(19) United States
(12) Patent Application Publication
(10) Pub. No.: US 2017/0319679 A1
(43) Pub. Date: Nov. 9, 2017

(54) HIV Vaccines Comprising One or More Population Episensus Antigens

(71) Applicant: Vir Biotechnology, Inc., Portland, OR (US)

(72) Inventors: Eric E. BRUENING, Damascus, OR (US); Klaus FRUEH, Portland, OR (US); Louis PICKER, Portland, OR (US); Bette T. KORBER, Santa Fe, NM (US); James THEILER, Santa Fe, NM (US); Emily MARSHALL, Portland, OR (US)

(73) Assignee: Vir Biotechnology, Inc., Portland, OR (US)

(21) Appl. No.: 15/516,491

(22) PCT Filed: Oct. 5, 2015
(86) PCT No.: PCT/US15/54067

§ 371 Date: Apr. 3, 2017

Related U.S. Application Data
(60) Provisional application No. 62/059,497, filed on Oct. 3, 2014.
(60) Provisional application No. 62/059,506, filed on Oct. 3, 2014.

(51) Int. Cl. A61K 39/12; A61K 39/21; A61K 39/00

(52) U.S. Cl. CPC A61K 39/12; A61K 39/21; C12N 2740/16034; A61K 2039/70; A61K 2039/53; C12N 2740/16234; C12N 2710/16143

(57) ABSTRACT

Provided herein are HIV-1 vaccines comprising a carrier and a population episensus antigen determined using the EpiGraph approach. Also provided are HIV-1 vaccines comprising a carrier, a population episensus antigen, and a tailored antigen. Also provided are methods of designing and producing an HIV-1 vaccine for a subject comprising designing vaccine antigens to optimally cover the diversity within a geographic area using an antigen amino acid sequence generated using the EpiGraph approach, and producing said designed vaccine antigen. Also provided are methods of inducing an effector memory T cell response comprising designing the one or more EpiGraph amino acid sequences, producing a vaccine comprising the one or more EpiGraph amino acid sequences and a vector, and administering the vaccine to a subject. Further provided are methods of treating HIV-1 in a subject comprising administering an effective amount of the described HIV-1 vaccines to the subject in need thereof.

### CROSS-REFERENCE TO RELATED APPLICATIONS

[0001] This application claims priority benefit to U.S. Provisional Patent Application Ser. No. 62/059,497, filed Oct. 3, 2014, and U.S. Provisional Patent Application Ser. No. 62/059,506, filed Oct. 3, 2014, each of which is hereby incorporated by reference herein in its entirety.

### REFERENCE TO SEQUENCE LISTING SUBMITTED ELECTRONICALLY

[0002] The content of the electronically submitted sequence listing in ASCII text file (Name: 3525.010PC02 Seq listing ST25.txt; Size: 3,634,253 bytes; and Date of Creation: Oct. 5, 2015) filed with the application is incorporated herein by reference in its entirety.

### FIELD OF THE INVENTION

[0003] The present subject matter relates, in general, to HIV and, in particular, to HIV vaccines.

### BACKGROUND OF THE INVENTION

[0004] In 2013, there were approximately 2.3 million new human immunodeficiency virus (HIV) infections, over 35 million people living with HIV, and 1.6 million acquired immune deficiency syndrome (AIDS) deaths. While great progress has been made in the treatment of HIV/AIDS, all individuals living with HIV will have to be treated with anti-retroviral therapy (ART) for the rest of their lives since drug therapy is unable to clear latent viral reservoirs that exist in resting CD4+ T cells at a frequency of about 1/10⁶ cells. See, Eriksson, S. 2013. PLoS Pathog 9:e1003174.

[0005] Major strategies to purge latent HIV reservoirs are generally aimed at reactivating latent virus using histone-deacetylase (HDAC) inhibitors, however clinical studies with HDAC-inhibitors have not consistently decreased latent reservoirs. One likely reason for this lies with the inability of HIV-specific CD8+ T cells to eliminate resting CD4+ T cells.

[0006] Only a few cases have been documented where HIV-1 has been cleared from an individual with a pre-existing infection. Until an effective therapy is developed, the estimated 35 million individuals living with HIV-1 will remain on antiviral drugs to suppress a viral reservoir that has resisted all efforts at eradication.

[0007] A cure for AIDS has been elusive, but recent work suggests that stringent immunological control can clear HIV over time. Specifically, it was found that rhesus macaques (RM) vaccinated with cytomegalovirus (CMV)-based vectors expressing simian immunodeficiency virus (SIV) antigens were initially infected, but SIV was undetectable by several stringent criteria one to two years after infection. This result is even more remarkable in light of the fact that the highly virulent SIVmac239 strain used in these studies has thwarted all previous vaccine attempts. These results have expanded the current paradigm from one focused on a preventative HIV vaccine to one in which an immunotherapy for HIV/AIDS will eventually become an essential part of the fight against this pandemic. Thus, in addition to a preventative vaccine, there remains a need for an effective therapy to treat individuals living with HIV-1. Specifically, there remains a need to design, manufacture, and test prophylactic and therapeutic HIV vaccines in preparation for clinical testing.

### SUMMARY OF THE INVENTION

[0008] Provided herein are HIV/SIV polypeptides comprising one or more EpiGraph antigen sequences comprising amino acid sequences corresponding to HIV/SIV Gag, Nef, Pol, Env, including full-length sequences, portions thereof, or any combination thereof. Also provided herein are HIV/SIV polypeptides comprising one or more population episensus antigen sequences comprising amino acid sequences corresponding to HIV/SIV Gag, Nef, Pol, Env, or a combination thereof. Also provided herein are one or more carriers comprising HIV/SIV polypeptides comprising one or more population episensus antigen sequences. Further provided herein are HIV/SIV polypeptides comprising one or more tailored antigen sequences comprising amino acid sequences corresponding to HIV/SIV Gag, Nef, Pol, Env, or a combination thereof. The HIV/SIV polypeptides of the present disclosure can comprise one or more HIV-1 tailored antigens, wherein the polypeptide comprises an amino acid sequence selected from the group consisting of: SEQ ID NOs: 692-696 and SEQ ID NOs: 754-789. Also provided herein are one or more carriers comprising HIV/SIV polypeptides comprising one or more tailored antigen sequences. EpiGraph antigen sequences having SEQ ID NOs: 691-789 are provided herein.

[0009] Provided herein are HIV-1 vaccines comprising one or more carriers and one or more population episensus antigens. Also provided herein are HIV-1 vaccines comprising a vector capable of expressing a population episensus antigen and one or more tailored antigens.

[0010] In some embodiments, the HIV-1 population episensus antigen comprises epitopes from Gag, Pol, Nef, Env, Tat, Rev, Vpr, Vif, or Vpu. In some embodiments, the HIV-1 population episensus antigen is a fusion antigen comprising two or more HIV-1 population episensus antigens. In some embodiments, the HIV-1 population episensus antigen is central to the HIV-1 B clade epidemic in the United States. In some embodiments, the HIV-1 population episensus antigen is central to the HIV-1 C clade epidemic in South Africa. In some embodiments, the HIV-1 population episensus antigen is central to the HIV-1 2-clade regional epidemic in Thailand. In some embodiments, the HIV-1 population episensus antigen is central to the HIV-1 M-group global set.

[0011] In some embodiments, the HIV-1 population episensus antigen comprises epitopes from Gag. In some embodiments, the HIV-1 population episensus antigen comprises epitopes from a conserved region of HIV-1. In some embodiments, the HIV-1 population episensus antigen comprises epitopes from a conserved region of Gag, Pol, or Nef. In some embodiments, the epitopes from the conserved region of Gag are epitopes from the p24 capsid protein of Gag.

[0012] In some embodiments, the HIV-1 tailored antigen comprises epitopes from Gag, Pol, Nef, Env, Tat, Rev, Vpr, Vif, or Vpu. In some embodiments, the HIV-1 tailored antigen is central to the HIV-1 M-group global set. In some embodiments, the HIV-1 tailored antigen is central to the HIV-1 C clade epidemic in South Africa. In some embodiments, the HIV-1 tailored antigen is central to the HIV-1 B clade epidemic in the United States.

[0013] Further provided are methods of preventing or treating HIV-1 infection in a subject comprising administering an effective amount of the described HIV-1 vaccines to the subject in need thereof. Further provided are methods of designing and producing an HIV-1 vaccine for a subject comprising sequencing HIV-1 viruses in an individual, selecting vaccine antigens designed to optimally cover the diversity within a geographic area, and inserting the vaccine antigens into a vector. Also provided herein are methods of treating an HIV-1 infection in a subject comprising administering an effective amount of the disclosed vaccines to the subject in need thereof.

[0014] Also provided herein are HIV-1 vaccines comprising one or more carriers and a population episensus antigen determined using the EpiGraph approach. Further provided herein are methods of designing vaccine antigens to optimally cover the diversity within a geographic area using a vaccine antigen amino acid sequence generated using the EpiGraph method of antigen amino acid sequence selection and producing said designed vaccine antigen. Further provided herein are methods of designing and producing an HIV-1 vaccine for a subject comprising determining the amino acid sequence of HIV-1 viruses in an individual by sequencing, selecting vaccine antigens designed to optimally cover the diversity within a geographic area using a vaccine antigen amino acid sequence generated using the EpiGraph method of antigen amino acid sequence selection, and inserting the vaccine antigens into a vector.

[0015] Also provided herein are methods of inducing an effector memory T cell response comprising determining one or more EpiGraph amino acid sequences, generating a vaccine comprising the one or more EpiGraph antigen amino acid sequences and one or more carriers, and administering the vaccine to a subject in need thereof. Further provided are methods of treating HIV-1 in a subject comprising administering an effective amount of the described HIV-1 vaccines to the subject in need thereof. Also provided herein are methods of protecting from an HIV-1 infection in a subject comprising administering an effective amount of the described HIV-1 vaccines to the subject in need thereof.

### BRIEF DESCRIPTION OF THE DRAWINGS

[0016] FIG. 1A shows a full graph for the CRF01-AE clade of the Nef protein. The rectangle is an inset shown in FIG. 1B.

[0017] FIG. 1B represents the inset from FIG. 1A. Nodes are grey dots, and represent each k-mer variant, with k=9. The edges are horizontal lines that connect epitopes whose sequences overlap by k−1 amino acids, as shown for the first two epitopes (eₐ=VTSSNMNNA [SEQ ID NO: 790], e_{b}=TSSNMNNAD [SEQ ID NO: 791]) in the upper left. Although the topological properties of the graph do not depend on the node positions, this plot uses the vertical axis to indicate epitope frequency in the target sequence set, y=f(e), for each node. The horizontal position x(e)=1+max_{e′εp(e)}x(e′), where P(e) is the set of predecessors of e, gives this plot the property that all directed edges connect from left to right. The ideal path through this graph keeps as much as possible to the largest y-values. The inset shows two paths through the nodes. The solid black line is the optimal path, and corresponds to the sequence TSSNMNNADSVWLRAQEEE [SEQ ID NO: 792] while the dashed line corresponds to TSSNMNNADCVWLRAQEEE [SEQ ID NO: 793]. The dashed line achieves higher f(e) values on 4 nodes, but the solid line has higher f(e) for 5 nodes, and Σf(e) is higher. Note there is no path that includes the highest-valued nodes for all values of x.

[0018] FIG. 2 shows nodes of an epitope graph showing the epitope k-character string, and the frequency (f) that the epitope is observed at that position in the aligned sequence set, and the cumulative best score S of consistent paths that end in that node. The nodes are arranged in columns with each column corresponding to the position t associated with the epitope. The lines connecting these nodes correspond to adjacent epitopes that are consistent. The aim is to find a consistent path through this graph that maximizes the sum of the frequency values in each node. The thicker lines show one path that leads to an optimal total score.

[0019] FIG. 3 shows that nodes from the initial solution (given by q1=ARCHSLM [SEQ ID NO: 794] as shown in FIG. 2 have their frequency values set to zero, and the cumulative scores S(t;e) are recomputed based on these new frequency nodes. This leads to an optimal solution to this complementary coverage problem: q2=DEFGKLM [SEQ ID NO: 795]. The thicker lines show one path that leads to an optimal total score.

[0020] FIGS. 4A-B show the epitope graph associated with a set of 690 US B-clade Gag protein sequences [SEQ ID NOs. 1-690], each aligned to 556 positions. The horizontal axis is the position t, and the columns of nodes indicate the different epitopes at each position. The nodes are arranged so that the most frequent at each position are at the bottom of each column. The full graph is shown in FIG. 4A; a close-up inset of the same graph is shown in FIG. 4B.

[0021] FIGS. 5A-C show that excluding rare variants decreases the coverage, but only slightly for Gag (FIG. 5A), Nef (FIG. 5B), and Pol (FIG. 5C). Coverage of polyvalent (m=2) solutions are shown as a function of minimum count fₒ (i.e., the population frequency of the rarest epitope in the vaccine). Dashed lines correspond to coverage given by the direct sequential algorithm; the black solid lines are based on the best solutions after 100 random restarts. The vertical axis, in all three plots, is restricted to a range of 0.015.

[0022] FIGS. 6A-B show two-antigen vaccine coverage. Comparisons illustrating the average epitope coverage per sequence of the contemporary B clade sequences isolated in the United States, which was considered as a hypothetical target population for a therapeutic vaccine. To illustrate potential T-cell epitope (PTE) coverage using a pair of natural within-clade sequences as vaccine antigens, 5000 randomly selected pairs of natural B clade sequences (gray) were evaluated as potential vaccines, and the distribution of average coverage of the 189 contemporary B clade US sequences is shown in the grey histogram. This is compared to the average coverage provided by a 2 antigen set of M group EpiGraphs (M database), a two antigen set of global B clade EpiGraphs (B database), and a US B clade tailored vaccine where the 2 best matches from a set of 6 representative EpiGraphs for manufacture were chosen as a “tailored” match for each of the 189 natural B clade US sequences. FIG. 6A shows the comparison for the full Gag protein. FIG. 6B shows comparisons for only the conserved p24 region.

[0023] FIG. 7 shows mapping potential epitope coverage spanning the HIV proteome.

[0024] FIG. 8 shows the average potential Gag epitope coverage of the HIV-1 B clade U.S. sequences by different vaccine antigens. FIG. 8A shows the average Gag epitope coverage by single vaccine antigens, and FIG. 8B shows the average Gag epitope coverage by pairs of vaccine antigens.

[0025] FIGS. 9A-C show that EpiGraph designed synthetic HIV antigens are expressed as full-length proteins. HeLa cells were transfected with expression plasmids encoding: fusion proteins of gag and nef for HIV or SIV (HIV M group EpiGraph 1 [SEQ ID NO: 705] and HIV M group EpiGraph 2 [SEQ ID NO: 707], SIVmac239 full length proteins, SIV variants hybrid proteins [SEQ ID NO: 713], and SIV conserved portions of gag and nef [SEQ ID NO: 714]), as represented in FIG. 9A; polymerase proteins of HIV or SIV (SIVmac239 full-length (FL), SIV variants hybrid proteins [SEQ ID NO: 715], (HIV M group EpiGraph 1[SEQ ID NO: 709] and HIV M group EpiGraph 2 [SEQ ID NO: 711], and SIV conserved portions of pol [SEQ ID NO: 716]), as represented in FIG. 9B; and fusion proteins of gag and nef for HIV (clade B EpiGraph 1 gag/nef [SEQ ID NO: 701]) and clade B EpiGraph 2 gag/nef [SEQ ID NO: 702]) and polymerase proteins for HIV (clade M epi 1 pol [SEQ ID NO: 709]); clade B EpiGraph 1 pol [SEQ ID NO: 703]); clade B EpiGraph 2 pol [SEQ ID NO: 704]), as represented in FIG. 9C. All gag/nef constructs include a carboxy-terminal V5 tag (FIG. 9A), and all pol constructs include a carboxy-terminal HA tag (FIGS. 9B and 9C). For FIG. 9B, 1 and 2 indicate multiple clones of each construct. Lysates were harvested at 48 hours post-transfection and immunoblotted using V5 (FIG. 9A) or HA (FIGS. 9B and 9C) antibodies. The observed molecular weight of the proteins is consistent with the predicted molecular weight for each of the constructs.

[0026] FIGS. 10A-B show that EpiGraph designed synthetic antigens are expressed by CMV vectors. As represented in FIG. 10A, RhCMV strain 68-1 expressing SIVmac 239 polymerase full-length (FL), a hybrid of SIV polymerases from different SIV variants [SEQ ID NO: 715], a synthetic polymerase gene based on global M group HIV EpiGraph 1 [SEQ ID NO: 709] or global M group HIV EpiGraph 2 [SEQ ID NO: 711] were constructed by BAC mutagenesis and reconstituted in telomerized Rhesus fibroblasts. As represented in FIG. 10B, RhCMV strain 68-1 expressing SIVmac239 conserved regions of the polymerase constructs [SEQ ID NO: 716] were also constructed by BAC mutagenesis and reconstituted in telomerized Rhesus fibroblasts. In all vectors, antigen expression is driven by the endogenous viral Rh107 promoter. Cell pellets were harvested at full CPE and immunoblotted for the HA tag expressed at the carboxy-terminus of each protein. For pol conserved, two independent clones (2.1 and 2.2) are shown in FIG. 10B.

[0027] FIGS. 11A-C shows conserved regions within: Nef (FIG. 11A), Gag (FIG. 11B), and Pol (FIG. 11C). defined based on the potential for potential T-cell epitope (PTE) coverage by a bivalent (i.e., 2 antigen) vaccine.

[0028] FIG. 12 illustrates the average Epigraph coverage of each of the conserved regions by different vaccine antigens, compared to the more variable sections of the proteins.

### DETAILED DESCRIPTION OF ILLUSTRATIVE EMBODIMENTS

[0029] Various terms relating to aspects of the description are used throughout the specification and claims. Such terms are to be given their ordinary meaning in the art unless otherwise indicated. Other specifically defined terms are to be construed in a manner consistent with the definitions provided herein.

[0030] As used in this specification and the appended claims, the singular forms “a,” “an,” and “the” include plural referents unless the content clearly dictates otherwise. Thus, for example, reference to “a cell” includes a combination of two or more cells, and the like.

[0031] The term “about” as used herein when referring to a measurable value such as an amount, a temporal duration, and the like, is meant to encompass variations of up to ±20% from the specified value, as such variations are appropriate to perform the disclosed methods. Unless otherwise indicated, all numbers expressing quantities of ingredients, properties such as molecular weight, reaction conditions, and so forth used in the specification and claims are to be understood as being modified in all instances by the term “about.” Accordingly, unless indicated to the contrary, the numerical parameters set forth in the following specification and attached claims are approximations that may vary depending upon the desired properties sought to be obtained by the present invention. At the very least, and not as an attempt to limit the application of the doctrine of equivalents to the scope of the claims, each numerical parameter should at least be construed in light of the number of reported significant digits and by applying ordinary rounding techniques.

[0032] Notwithstanding that the numerical ranges and parameters setting forth the broad scope of the invention are approximations, the numerical values set forth in the specific examples are reported as precisely as possible. Any numerical value, however, inherently contain certain errors necessarily resulting from the standard deviation found in their respective testing measurements.

[0033] As employed above and throughout the disclosure the term “effective amount” refers to an amount effective, at dosages, and for periods of time necessary, to achieve the desired result with respect to the treatment of the relevant disorder, condition, or side effect. It will be appreciated that the effective amount of components of the present invention will vary from patient to patient not only with the particular vaccine, component or composition selected, the route of administration, and the ability of the components to elicit a desired result in the individual, but also with factors such as the disease state or severity of the condition to be alleviated, hormone levels, age, sex, weight of the individual, the state of being of the patient, and the severity of the pathological condition being treated, concurrent medication or special diets then being followed by the particular patient, and other factors which those skilled in the art will recognize, with the appropriate dosage being at the discretion of the attending physician. Dosage regimes may be adjusted to provide the improved therapeutic response. An effective amount is also one in which any toxic or detrimental effects of the components are outweighed by the therapeutically beneficial effects.

[0034] The term “administering” means either directly administering a compound or composition of the present invention, or administering a prodrug, derivative or analog which will form an equivalent amount of the active compound or substance within the body.

[0035] The terms “subject,” “individual,” and “patient” are used interchangeably herein, and refer to an animal, for example a human, to whom treatment, including prophylactic treatment, with the pharmaceutical composition according to the present invention, is provided. The term “subject” as used herein refers to human and non-human animals. The terms “non-human animals” and “non-human mammals” are used interchangeably herein and include all vertebrates, e.g., mammals, such as non-human primates, (particularly higher primates), sheep, dog, rodent, (e.g., mouse or rat), guinea pig, goat, pig, cat, rabbits, cows, horses and non-mammals such as reptiles, amphibians, chickens, and turkeys.

[0036] The term “cocktail” refers to a set of antigens intended to be delivered in combination to a patient.

[0037] The term “episensus” refers to an epitope based consensus sequence. It is a sequence whose epitopes match, as closely as possible, the epitopes in a reference set of natural sequences. The terms “epitope” and “potential epitope” refer to a sequence of k characters (typically k is in the range of 8-12), often in the context of a k-character subsequence of a much longer natural or vaccine antigen sequence. T cells can recognize such peptides in an immune response.

[0038] The term “EpiGraph” refers to a new computational strategy developed to create sequences that provide an optimal episensus sequence, or set of sequences that combined provide optimal coverage of a population of diverse viral sequences.

[0039] The terms “EpiGraph sequence” or “Episensus antigen” refer to the vaccine inserts designed based on the EpiGraph algorithm.

[0040] The term “population episensus antigen” refers to a sequence derived with the EpiGraph algorithm, which are “central” to a population of HIV sequences. The population could be a specific HIV clade, cluster of sequences derived using our Tailored epitope based clustering algorithm, or the global epidemic. “Central” is defined in terms of sharing potential epitopes, so it is a computationally-derived sequence that provides the maximal average epitope coverage of the population.

[0041] EpiGraph sequences can be used as a solution for a prophylactic, preventive vaccine, or can be adopted as part of more complex strategies for the design of therapeutic vaccines that would be tailored to match individual infections. The term “tailored vaccine set” refers to a set of vaccine antigen sequences designed for manufacture, from which a subset antigens could be selected to best match a patient's virus for delivery as a therapeutic vaccine.

[0042] The term “tailored antigen” or “tailored episensus antigen” refers to one or more amino acid sequences from the “tailored vaccine set” that would be specifically selected based on a best match to a patient's infecting HIV-1 strain. for delivery to that patient as a therapeutic vaccine.

[0043] As used herein, the terms “treatment” or “therapy” (as well as different forms thereof, including curative or palliative) refer to treatment of an infected person. As used herein, the term “treating” includes alleviating or reducing at least one adverse or negative effect or symptom of a condition, disease or disorder. This condition, disease or disorder can be HIV infection.

[0044] As used herein, the terms “prevention” or “prophylaxis” refer to preventing a subject from becoming infected with, or reducing the risk of a subject from becoming infected with, or halting transmission of, or the reducing the risk of transmission of, for example, HIV, SIV, or a related virus.

[0045] “Pharmaceutically acceptable” refers to those compounds, materials, compositions, and/or dosage forms which are, within the scope of sound medical judgment, suitable for contact with the tissues of human beings and animals without excessive toxicity, irritation, allergic response, or other problem complications commensurate with a reasonable benefit/risk ratio.

[0046] Vectors that can be used include, but are not limited to, plasmids, bacterial vectors, and viral vectors. Viral vectors include cytomegalovirus (CMV) vectors. An advantage of these CMV vectors for use in therapeutic vaccine delivery is that they create a new CD8+ T cell epitope paradigm and induce more potent and enduring responses. It has been shown in animal models that vaccines based on these viral vectors can clear viral infections (Hansen, S. G. 2013. Science 340:1237874), and so these approaches have promise for a therapeutic vaccine, a setting in which tailored vaccines can be useful.

[0047] Other viral vectors can include poxvirus (vaccinia), including vaccinia Ankara and canarypox; adenoviruses, including adenovirus type 5 (Ad5); rubella; sendai virus; rhabdovirus; alphaviruses; and adeno-associated viruses. Alternatively, EpiGraph vaccine antigens could be delivered as DNA, RNA or protein components of a vaccine. As this is an antigen design strategy, EpiGraph-designed vaccine antigens would be compatible with essentially any mode of vaccine antigen delivery.

[0048] In certain embodiments, vaccines designed using EpiGraph amino acid sequences have a single antigen. In certain embodiments, vaccines designed using EpiGraph amino acid sequences have sets of antigens.

[0049] In certain embodiments, the EpiGraph antigen sequences can be used in a prophylactic vaccine setting.

[0050] In certain embodiments, the EpiGraph strategy can be used to make sequences that fully optimize epitope coverage for a prophylactic vaccine. This could be one sequence, or several sequences designed to complement each other as a preventative vaccine. EpiGraph vaccines could be used in any vector, including, but not limited to, plasmids, bacterial vectors, and viral vectors.

[0051] In the EpiGraph algorithm, the natural sequences are characterized by a large graph of nodes, each node corresponding to an epitope that appears in the natural sequences. Directed edges connect two nodes when the corresponding two epitope strings are “consistent”, meaning the last k−1 characters in the first string agree with the first k−1 characters in the second string (e.g., “EPTAPPAEPTAP” [SEQ ID NO: 796] and “PTAPPAEPTAPP” [SEQ ID NO: 797] are consistent k=12-mers). If two strings are consistent, then a string of length k+1 (e.g., “EPTAPPAEPTAPP”) [SEQ ID NO: 798] contains both epitopes. More generally, a path through this graph of nodes and edges corresponds to a single string that contains k-mer substrings corresponding to each of the nodes in the graph. Each node is weighted according to how many sequences in the reference set exhibit a substring corresponding to that node. The EpiGraph algorithm uses a dynamic programming scheme to find the path through this full graph that maximizes the sum of these weights, and therefore provides the greatest coverage.

[0052] Certain embodiments provided include an HIV-1 vaccine comprising a vector and a population episensus antigen, or combination of optimized EpiGraph antigens designed to be used as a set. There are many different vectors that could be used for the vaccine. For example, one type of vector that can be used is a viral vector. These viral vectors can include a human cytomegalovirus (HCMV), a poxvirus, adenoviruses, rubella, sendai virus, rhabdovirus, alphavirus or adeno-associated virus. The vaccine could also be delivered as a gene encoding the EpiGraph protein, either using DNA, RNA, or included as an expressed protein or part of a protein.

[0053] In certain embodiments, EpiGraph antigen of the disclosed vaccines can be derived from the HIV-1 Gag protein. In another embodiment, the HIV-1 Gag protein has been inactivated by eliminating a myristoylation sequence in the N-terminus of the HIV-1 Gag protein. In another embodiment, the EpiGraph antigen can be derived from the HIV-1 Pol or Nef protein, or indeed any other HIV protein, including Env, Tat, Rev, Vif, or Vpu.

[0054] In certain embodiments, the population episensus antigen can be determined using the EpiGraph approach. This population episensus antigen could then be used to create a vaccine. Alternatively, EpiGraphs could be designed as a combination of sequences designed to be used as a set. HIV-1 can be split into clades based on geographic location. In one embodiment, the population episensus antigen is central to the HIV-1 B clade epidemic in the United States in the disclosed vaccines. In another embodiment, the population episensus antigen is central to the HIV-1 C clade epidemic in South Africa in the disclosed vaccines. In another embodiment, the population episensus antigen is central to the HIV-1 2-clade regional epidemic in Thailand in the disclosed vaccines. In another embodiment, the population episensus antigen is central to the HIV-1 M-group global set in the disclosed vaccines.

[0055] In some embodiments, the HIV-1 population episensus antigen comprises epitopes from Gag, Pol, Nef, Env, Tat, Rev, Vpr, Vif, or Vpu. In some embodiments, the HIV-1 population episensus antigen comprises epitopes from Gag and comprises the amino acid sequence of SEQ ID NO: 691, SEQ ID NO: 697, SEQ ID NO: 698, SEQ ID NO: 699, or SEQ ID NO: 700. In some embodiments, the HIV-1 population episensus antigen comprises epitopes from a conserved region of HIV-1. In some embodiments, the HIV-1 population episensus antigen comprises epitopes from a conserved region of Gag, Pol, or Nef. In some embodiments, the epitopes from the conserved region of Gag are epitopes from the p24 capsid protein of Gag.

[0056] In some embodiments, the HIV-1 population episensus antigen is a fusion antigen comprising two or more HIV-1 population episensus antigens. In some embodiments, the fusion antigen comprises a HIV-1 population episensus antigen comprising Gag epitopes and a HIV-1 population episensus antigen comprising Nef epitopes. In some embodiments, the fusion antigen comprises a HIV-1 population episensus antigen comprising epitopes from a conserved region of Gag and a HIV-1 population episensus antigen comprising epitopes from a conserved region of Nef. In some embodiments, the epitopes of the fusion antigen from the conserved region of Gag are epitopes from the p24 capsid protein of Gag.

[0057] In some embodiments, the HIV-1 population episensus antigen is central to the HIV-1 B clade epidemic in the United States. In some embodiments, the HIV-1 B clade population episensus antigen comprises Gag epitopes and comprises the amino acid sequence of SEQ ID NO: 730, SEQ ID NO: 732, or SEQ ID NO: 778. In some embodiments, the HIV-1 B clade population episensus antigen comprises epitopes from the p24 capsid protein of Gag and comprises the amino acid sequence of SEQ ID NO: 731, SEQ ID NO: 733, or SEQ ID NO: 779. In some embodiments, the HIV-1 B clade population episensus antigen comprises Nef epitopes and comprises the amino acid sequence of SEQ ID NO: 734 or SEQ ID NO: 736. In some embodiments, the HIV-1 B clade population episensus antigen comprises epitopes from a conserved region of Nef and comprises the amino acid sequence of SEQ ID NO: 735 or SEQ ID NO: 737. In some embodiments, the HIV-1 B clade population episensus antigen comprises Pol epitopes and comprises the amino acid sequence of SEQ ID NO: 703, SEQ ID NO: 704, SEQ ID NO: 738, or SEQ ID NO: 740. In some embodiments, the HIV-1 B clade population episensus antigen comprises epitopes from a conserved region of Pol and comprises the amino acid sequence of SEQ ID NO: 739 or SEQ ID NO: 741. In some embodiments, the HIV-1 B clade population episensus antigen is a fusion antigen comprising (1) a HIV-1 B clade population episensus antigen comprising Gag epitopes and (2) a HIV-1 B clade population episensus antigen comprising Nef epitopes, wherein the fusion antigen comprises the amino acid sequence of SEQ ID NO: 701 or SEQ ID NO: 702. In some embodiments, the HIV-1 B clade population episensus antigen is a fusion antigen comprising (1) a HIV-1 B clade population episensus antigen comprising epitopes from the p24 capsid protein of Gag and (2) a HIV-1 B clade population episensus antigen comprising epitopes from a conserved region of Nef.

[0058] In some embodiments, the HIV-1 population episensus antigen is central to the HIV-1 C clade epidemic in South Africa. In some embodiments, the HIV-1 C clade population episensus antigen comprises Gag epitopes and comprises the amino acid sequence of SEQ ID NO: 742, SEQ ID NO: 744, or SEQ ID NO: 766. In some embodiments, the HIV-1 C clade population episensus antigen comprises epitopes from the p24 capsid protein of Gag and comprises the amino acid sequence of SEQ ID NO: 743, SEQ ID NO: 745, or SEQ ID NO: 767. In some embodiments, the HIV-1 C clade population episensus antigen comprises Nef epitopes and comprises the amino acid sequence of SEQ ID NO: 746 or SEQ ID NO: 748. In some embodiments, the HIV-1 C clade population episensus antigen comprises epitopes from a conserved region of Nef and comprises the amino acid sequence of SEQ ID NO: 747 or SEQ ID NO: 749. In some embodiments, the HIV-1 C clade population episensus antigen comprises Pol epitopes and comprises the amino acid sequence of SEQ ID NO: 750 or SEQ ID NO: 752. In some embodiments, the HIV-1 C clade population episensus antigen comprises epitopes from a conserved region of Pol and comprises the amino acid sequence of SEQ ID NO: 751 or SEQ ID NO: 753. In some embodiments, the HIV-1 C clade population episensus antigen is a fusion antigen comprising (1) a HIV-1 C clade population episensus antigen comprising Gag epitopes and (2) a HIV-1 C clade population episensus antigen comprising Nef epitopes. In some embodiments, the HIV-1 C clade population episensus antigen is a fusion antigen comprising (1) a HIV-1 C clade population episensus antigen comprising epitopes from the p24 capsid protein of Gag and (2) a HIV-1 C clade population episensus antigen comprising epitopes from a conserved region of Nef.

[0059] In some embodiments, the HIV-1 population episensus antigen is central to the HIV-1 2-clade regional epidemic in Thailand. In some embodiments, the HIV-1 2-clade population episensus antigen comprises Gag epitopes. In some embodiments, the HIV-1 2-clade population episensus antigen comprises epitopes from the p24 capsid protein of Gag. In some embodiments, the HIV-1 2-clade population episensus antigen comprises Nef epitopes. In some embodiments, the HIV-1 2-clade population episensus antigen comprises epitopes from a conserved region of Nef. In some embodiments, the HIV-1 2-clade population episensus antigen comprises Pol epitopes. In some embodiments, the HIV-1 2-clade population episensus antigen comprises epitopes from a conserved region of Pol. In some embodiments, the HIV-1 2-clade population episensus antigen is a fusion antigen comprising (1) a HIV-1 2-clade population episensus antigen comprising Gag epitopes and (2) a HIV-1 2-clade population episensus antigen comprising Nef epitopes. In some embodiments, the HIV-1 2-clade population episensus antigen is a fusion antigen comprising (1) a HIV-1 2-clade population episensus antigen comprising epitopes from the p24 capsid protein of Gag and (2) a HIV-1 2-clade population episensus antigen comprising epitopes from a conserved region of Nef.

[0060] In some embodiments, the HIV-1 population episensus antigen is central to the HIV-1 M-group global set. In some embodiments, the HIV-1 M-group population episensus antigen comprises Gag epitopes and comprises the amino acid sequence of SEQ ID NO: 718, SEQ ID NO: 720, or SEQ ID NO: 754. In some embodiments, the HIV-1 M-group population episensus antigen comprises epitopes from the p24 capsid protein of Gag and comprises the amino acid sequence of SEQ ID NO: 719, SEQ ID NO: 721, or SEQ ID NO: 755. In some embodiments, the HIV-1 M-group population episensus antigen comprises Nef epitopes and comprises the amino acid sequence of SEQ ID NO: 722 or SEQ ID NO: 724. In some embodiments, the HIV-1 M-group population episensus antigen comprises epitopes from a conserved region of Nef and comprises the amino acid sequence of SEQ ID NO: 723 or SEQ ID NO: 725. In some embodiments, the HIV-1 M-group population episensus antigen is a fusion antigen comprising (1) a HIV-1 M-group population episensus antigen comprising Gag epitopes and (2) a HIV-1 M-group population episensus antigen comprising Nef epitopes, wherein the fusion antigen comprises the amino acid sequence of SEQ ID NO: 705 or SEQ ID NO: 707. In some embodiments, the HIV-1 M-group population episensus antigen is a fusion antigen comprising (1) a HIV-1 M-group population episensus antigen comprising epitopes from the p24 capsid protein of Gag and (2) a HIV-1 M-group population episensus antigen comprising epitopes from a conserved region of Nef, wherein the fusion antigen comprises the amino acid sequence of SEQ ID NO: 706 or SEQ ID NO: 708. In some embodiments, the HIV-1 M-group population episensus antigen comprises Pol epitopes and comprises the amino acid sequence of SEQ ID NO: 709, SEQ ID NO: 711, SEQ ID NO: 726, or SEQ ID NO: 728. In some embodiments, the HIV-1 M-group population episensus antigen comprises epitopes from a conserved region of Pol and comprises the amino acid sequence of SEQ ID NO: 710, SEQ ID NO: 712, SEQ ID NO: 727, or SEQ ID NO: 729.

[0061] In certain embodiments, the disclosed vaccines can further comprise a HCMV vector comprising a HCMV backbone and a tailored antigen selected to be a best match natural HIV-1 strain. In another embodiment, the disclosed vaccines can further comprise a HCMV vector comprising a HCMV backbone and a tailored antigen selected to be a best match different HIV-1 strain.

[0062] In some embodiments, the HIV-1 tailored antigen comprises epitopes from Gag, Pol, Nef, Env, Tat, Rev, Vpr, Vif, or Vpu. In some embodiments, the tailored antigen comprises a sequence selected from: SEQ ID NOs. 692-696; SEQ ID NOs. 756-765; SEQ ID NOs. 769-777; or SEQ ID NOs. 780-789.

[0063] In some embodiments, the HIV-1 tailored antigen comprises epitopes from Gag and comprises the amino acid sequence of SEQ ID NO: 692, SEQ ID NO: 693, SEQ ID NO: 694, SEQ ID NO: 695, or SEQ ID NO: 696.

[0064] In some embodiments, the HIV-1 tailored antigen is central to the HIV-1 M-group global set. In some embodiments, the HIV-1 M-group tailored antigen comprises Gag epitopes and comprises an amino acid sequence selected from the group consisting of: SEQ ID NOs: 756-765. In some embodiments, the HIV-1 M-group tailored antigen comprises epitopes from the p24 capsid protein of Gag and comprises the amino acid sequence of SEQ ID NO: 757, SEQ ID NO: 759, SEQ ID NO: 761, SEQ ID NO: 763, or SEQ ID NO: 765.

[0065] In some embodiments, the HIV-1 tailored antigen is central to the HIV-1 C clade epidemic in South Africa. In some embodiments, the HIV-1 C clade tailored antigen comprises Gag epitopes and comprises an amino acid sequence selected from the group consisting of: SEQ ID NOs: 768-777. In some embodiments, the HIV-1 C clade tailored antigen comprises epitopes from the p24 capsid protein of Gag and comprises the amino acid sequence of SEQ ID NO: 769, SEQ ID NO: 771, SEQ ID NO: 773, SEQ ID NO: 775, or SEQ ID NO: 777.

[0066] In some embodiments, the HIV-1 tailored antigen is central to the HIV-1 B clade epidemic in the United States. In some embodiments, the HIV-1 B clade tailored antigen comprises Gag epitopes and comprises an amino acid sequence selected from the group consisting of: SEQ ID NOs: 780-789. In some embodiments, the HIV-1 B clade tailored antigen comprises epitopes from the p24 capsid protein of Gag and comprises the amino acid sequence of SEQ ID NO: 781, SEQ ID NO: 783, SEQ ID NO: 785, SEQ ID NO: 787, or SEQ ID NO: 789.

[0067] In certain embodiments, methods of treating HIV-1 in a subject comprising administering an effective amount of one of the disclosed vaccines to the subject in need thereof is provided. In another embodiment, the selecting vaccine antigens to optimally cover the diversity within a geographical area uses a vaccine antigen sequence generated using the EpiGraph method of antigen sequence selection.

[0068] Embodiments of the present invention include methods of treating an HIV-1 infection in a subject comprising administering an effective amount of any of these disclosed vaccines to the subject in need thereof.

[0069] Embodiments of the present invention also include methods of inducing an effector memory T cell response comprising determining one or more EpiGraph sequences, generating a vaccine comprising the one or more EpiGraph amino sequences and a vector; and, administering the vaccine to a subject in need thereof. In another embodiment, methods are provided of inducing an effector memory T cell response wherein the one or more EpiGraph amino sequences comprises SEQ ID NO: 697, SEQ ID NO: 698, SEQ ID NO: 699, or SEQ ID NO: 700. This vaccine can be a prophylactic or therapeutic vaccine.

[0070] Recent breakthroughs in HIV vaccine research include the concept of an effector memory T cell (TEM)-inducing vaccine to prevent HIV infection. Unlike central memory T cells (TCM) induced by traditional vaccine approaches, TEM are persistently maintained in lymphoid tissues and extralymphoid effector sites and are immediately ready to mediate anti-viral effector function, thus providing a constant immune shield at the portals of viral entry and sites of viral reactivation. The most qualified vector system to induce and indefinitely maintain TEM is derived from CMV. Presumably due to continuous, low-level reactivation and/or gene expression in persistently infected cells, CMV maintains just the right amount of persistent, low level immune stimulation required for TEM maintenance without triggering T cell exhaustion.

[0071] In certain embodiments, the tailored antigen cocktail can be used in a therapeutic vaccine setting. For example, the tailored vaccine can use a k-means clustering strategy to a defined set of 6-10 sequences that provide very good coverage of epitopes in a population of people that are infected with a highly variable pathogen, such as HIV. The virus infecting a subject can be sequenced and 2 or 3 tailored vaccines will be delivered that best cover the infecting virus. Epitope coverage will be optimized while epitope mismatches will be will be minimized between the vaccine and the infecting strain.

[0072] Certain embodiments provided include an HIV-1 vaccine comprising a HCMV backbone vector, which lacks certain CMV gene regions, and a population episensus antigen. In certain embodiments, the HCMV backbone can lack the UL131A-128 gene region. Certain embodiments can also include deletion of the tegument protein pp71 (UL82) gene. (U.S. Patent Application Publication Nos. 2014-0141038; 2008-0199493; 2013-0142823: and International Application Publication No. WO/2014/138209).

[0073] In certain embodiments, the present disclosure provides vaccines which can comprise a second tailored antigen sequence. In certain embodiments, the vaccines can comprise a second, a third, or more tailored antigen sequences. The episensus antigen can comprise the amino acid sequence of SEQ ID NO: 691. The tailored antigen can comprise the amino acid sequence of SEQ ID NO: 692, SEQ ID NO: 693, SEQ ID NO: 694, SEQ ID NO: 695 or SEQ ID NO: 696. In one embodiment, the first tailored antigen sequence and the second tailored antigen sequence comprise two of the amino acid sequences of SEQ ID NO: 692, SEQ ID NO: 693, SEQ ID NO: 694, SEQ ID NO: 695 and SEQ ID NO: 696. In another embodiment, the first tailored antigen sequence, the second tailored antigen sequence and the third tailored antigen sequence comprises three of the amino acid sequences of SEQ ID NO: 692, SEQ ID NO: 693, SEQ ID NO: 694, SEQ ID NO: 695 and SEQ ID NO: 696.

[0074] Also provided are tailored antigen sequences that can comprise SEQ ID NO: 692, SEQ ID NO: 693, SEQ ID NO: 694, SEQ ID NO: 695 or SEQ ID NO: 696.

[0075] In certain embodiments, the disclosed vaccines can further comprise a HCMV vector comprising a HCMV backbone and a tailored antigen selected to be a best match natural HIV-1 strain. In another embodiment, the disclosed vaccines can further comprise a HCMV vector comprising a HCMV backbone and a tailored antigen selected to be a best match different (and distant) HIV-1 strain.

[0076] In certain embodiments, the episensus antigen and the tailored antigen of the disclosed vaccines can be derived from the HIV-1 Gag protein. In another embodiment, the HIV-1 Gag protein has been inactivated by eliminating a myristoylation sequence in the N-terminus of the HIV-1 Gag protein. In another embodiment, the episensus antigen and the tailored antigen can be derived from the HIV-1 Pol or Nef protein.

[0077] In certain embodiments, methods of treating HIV-1 in a subject comprising administering an effective amount of one of the disclosed vaccines to the subject in need thereof is provided. In another embodiment, methods of designing and producing an HIV-1 vaccine for a subject comprising sequencing HIV-1 viruses in an individual, selecting vaccine antigens designed to optimally cover the diversity within a geographic area, and, inserting the vaccine antigens into a vector are provided.

[0078] Certain embodiments include methods of treating an HIV-1 infection in a subject comprising administering an effective amount of any of this disclosed vaccines to the subject in need thereof.

[0079] The following examples are provided to describe the embodiments described herein with greater detail. They are intended to illustrate, not to limit, the embodiments.

[0080] All documents, patent, and patent applications cited herein are hereby incorporated by reference, and may be employed in the practice of the invention.

### EXAMPLES

### Example 1: Graphical Model for Optimal Epitope Coverage of Aligned Sequences

[0081] The existence of a set S={s₁, s₂, . . . , s_{N}} of N aligned sequences was presumed. Each sequence is a string of alphabetic characters (corresponding to the twenty amino acids, possibly in addition to a few special characters corresponding to gaps, unknowns, and such). Since the sequences are aligned, all have the same length T, and the positions t=1 . . . T are well-defined from sequence to sequence; sₙ [t] will be written as the t'th character in the n'th sequence. It is useful to introduce the notation s[t:u] for the subsequence of s that begins at position t and ends at position u.

[0082] A potential epitope was defined as a short sequence of k characters, typically 8 to 12. Epitopes of interest are subsequences of the sequences in S. Indeed, a sequence s can be thought of as a list of epitopes: e₁, . . . , e_{T-k+1}, with eₜ=s[t:t+k−1]. Note, however, that for a list of epitopes to be associated with a sequence, it is necessary that the epitopes be consistent. Specifically, it is required for any adjacent pair eₜ and eₜ₊₁ that the last k−1 characters of eₜ agree with the first k−1 characters of eₜ₊₁; that is: eₜ [2:k]=eₜ₊₁ [1:k−1].

[0083] For each epitope e, a frequency f(e) can be associated which counts the fraction of sequences in S for which the epitope appears.

[0084] For the general cocktail problem, a set of artificial sequences Q={q₁, . . . , q_{M}} is sought whose epitopes have useful properties. Let E_{Q} be the set of all epitopes that appear in Q; that is:

E_{Q}={e|e=qₘ[t:t+k−1] for some choice of m,t}.

[0085] In particular, those epitopes were designed to cover as much of the sequence set S as possible. The goal was to maximize the coverage score

Σf(e) where the sum is over e [symbol] E_{Q}

[0086] With M<N, and typically M [symbol] N, all the epitopes cannot in general be covered.

[0087] For the aligned sequence problem, some simplifications can be made. In this case, each position in the alignment was treated as a different (but not independent) problem. The frequency function now depended on position: f (t, e) was the number of sequences in S for which e is the k-mer subsequence that began at position t; thus,

f(t,e)=ΣI(e=sₙ[t:t+k−1])

where I is the indicator function: it is one if its argument is true, and is zero otherwise. The set E_{Q} can also be partitioned according to position in sequences q. Thus:

E_{Q}[t]={e|e=qₘ[t:t+k−1] for some m}

[0088] This enables a production of a coverage measure for each position c[t]=Σ_{eεEQ[t]}f(t,e), from which an overall coverage is given by c=Σₜ c[t].

[0089] For the trivial special case k=1, the epitopes were just the amino acid characters. But even though the problem was trivial to solve, the solution was still useful. For M=1, the best solution is given by the consensus sequence, with q₁ [t] chosen to be the amino acid that is most common at position t. For M=2, one can optimize the coverage by taking q₂ [t] to be the second-most-common amino acid at position t. And so on for larger M.

[0090] For k>1, the problem becomes nontrivial because the epitopes overlap, and so each c[t] can no longer be optimized independently. The M=1 case was called the “episensus” problem because it is like the consensus, except that it is a consensus of epitopes that was sought.

[0091] In one example, the consensus and the k=3 episensus disagree: The consensus used the most popular letter in each position. The episensus used the most popular “epitope”, where we call a potential epitope a string of 3 characters. Table 1 expands this example to illustrate overlapping epitope strings.

```
TABLE 1
Shown are six sequences and their associated k = 3
epitopes. The bottom line shows the consensus
  sequences (formed from the most common character
at each position) and the most common epitopes at
each position. But these epitopes (in
particular, EFG and CHS) are inconsistent with
each other, so they cannot be combined into a
  single episensus solution. In this case, the best
episensus score is given (though not uniquely)
  by the sequence ARCHSLM [SEQ ID NO: 794], which
covers 1 + 1 + 2 + 2+  3 = 9 out of 30 possible
    epitopes in the sequences. The consensus,
ARCGSLM [SEQ ID NO: 799], covers 1 + 1 + 1 + 1 +
    3 the frequency of the most popular epitopes at
each position: in this case, that gives 2 +
2 + 2 + 2 + 3 = 11.
```

| | Sequences | Toy Epitopes | | | | |
|---|---|---|---|---|---|---|
| [SEQ ID NO: 800] | ARCGSPM | ARC | RCG | CGS | GSP | SPM |
| [SEQ ID NO: 801] | ARYGSNM | ARY | RYG | YGS | GSN | SNM |
| [SEQ ID NO: 802] | AYCHSLM | AYC | YCH | CHS | HSL | SLM |
| [SEQ ID NO: 803] | YRCHSLM | YRC | RCH | CHS | HSL | SLM |
| [SEQ ID NO: 804] | DEFGSLM | DEF | EFG | FGS | GSL | SLM |
| [SEQ ID NO: 805] | DEFGKLM | DEF | EFG | FGK | TKL | KLM |

[0092] Solving the Episensus Problem.

[0093] The M=1 case was addressed first, in which a single sequence q whose epitopes optimally cover the epitopes in an unaligned sequence list S was sought. The EpiGraph algorithm under appropriate assumptions achieves the optimal solution. In the comparisons, the consensus algorithm was also considered (very simple and fast) and the optimization by genetic algorithm (very slow) as described in (Fisher, Nat Med. 2007 January; 13(1):100-6, incorporated herein by reference). The EpiGraph algorithm is illustrated in FIGS. 1A and 1B.

[0094] Later the more general cocktail of vaccines problem was considered, with M>1 and shown how the episensus algorithm were modified for this more general problem.

[0095] FIG. 2 shows nodes of an epitope graph, where each node includes the epitope k-character string, and the frequency (f) that the epitope is observed at that position in the aligned sequence set, and the cumulative best score S of consistent paths that end on that node. The nodes were arranged in columns with each column corresponding to the position t associated with the epitope. The lines connecting these nodes correspond to adjacent epitopes that were consistent. The aim is to and a consistent path through this graph that maximized the sum of the frequency values in each node.

[0096] The thicker lines in FIG. 2 show one path that leads to an optimal total score. There will always be at least one such path, but it may not be unique.

[0097] The cumulative score S(t, e) was defined as the highest score achievable starting at t=1 and finishing at the epitope e at position t. It was observed that S(t=1, e)=f(e) and that values for t>1 can be computed recursively:

S(t,e)=f(e)+max_{e′}S(t−1,e′), with e′ [symbol] E(t−1,e)

where E (t−1, e) is the set of epitopes at position t−1 that are consistent with e, which is at position t. Having computed this cumulative score for all the epitopes, the total score was found for the best path as the maximum score on the last column: Sₘₐₓ=maxₑ S(T−k+1, e). Furthermore, it can be worked backwards from this maximum to find the optimal path:

e*_{T-k+1}=argmaxₑS(T−k+1,e)

e*ₜ₋₁=argmax_{e′}S(t−1,e′) with e′ [symbol] E(t−1,e*ₜ)

The sequence e*₁, e*₂, . . . , e*_{T-k} defined the highest-scoring consistent sequence of epitopes. The episensus string q is obtained by taking the first character from each epitope: q[t]=eₜ*[1], and finishing off with the last epitope: q[T−k:T]=e*_{T-k}[1:k].

[0098] The argmax operator may not have a unique value; if it does not, then there will be multiple solutions to the episensus problem, all of which are optimal in the sense of coverage.

[0099] Gaps.

[0100] In order to align sequences, insertions and deletions have to be dealt with, and this introduces gaps into the aligned sequences. For example, the sequences ARCCDEGH [SEQ ID NO: 806] and ARCDEFGH [SEQ ID NO: 807] were better aligned as ARCCDE-GH [SEQ ID NO: 808] and ARC-DEFGH [SEQ ID NO: 809]. Placeholder epitopes were developed to deal with these gaps in the EpiGraph algorithm.

[0101] Placeholder Epitopes:

[0102] The k=3 epitopes were ARC, RCC, CCD, CDE, DEG, EGH and ABC, BCD, CDE, DEF, EFG, FGH respectively; but when epitopes were aligned by first column gaps need to be introduced in that list: ABC, BCC, CCD, CDE, DEG, EGH, -GH and ABC, BCD, CDE, -DE, DEF, EFG, FGH. The strings -GH and -DE were placeholder epitopes. Placeholders are not counted in the covering function; that is: f(t; −XY)=0. But they were still useful because they can be used to define consistency of adjacent epitopes.

[0103] For ungapped sequences, two adjacent epitopes were considered consistent if the last k−1 characters of the first epitope agree with the first k−1 characters of the second epitope. Thus ABC and BCD are consistent, but BCC and CDE are not. When gaps are introduced, then a pair is consistent if the second epitope begins with a gap character is considered, and the remaining k−1 characters match the last k−1 characters of the last epitope. Thus, CDE and -DE are consistent.

[0104] For the drop-in-place algorithm, a “substrate” sequence that is generally taken to be the consensus sequence was used. Then, all the epitopes at all the positions were taken and sorted according to how often they appear. Starting from the least frequent epitope, each epitope was dropped onto the substrate by replacing the characters in the substrate at the positions [t:t+k−1] with the characters in the epitope. When the most frequently occurring epitope was dropped onto the substrate, a string was used as the episensus solution q. Since the most frequent epitopes overwrite the rarer epitopes, higher epitope coverage was achieved. And since a single sequence q is always updated, the final solution will be composed of consistent epitopes.

[0105] The algorithm may not be fully deterministic because some epitopes might have identical frequencies, and if their positions are overlapping, then the final result may depend on what order they are dropped. On implementation, the order that the sort algorithm gives is taken, but there is an opportunity to randomize those orders and to make multiple runs of the algorithm, with some runs possibly giving higher scores.

[0106] Heuristic “Drop-in-Place” Algorithm.

[0107] In this algorithm, a “substrate” sequence was taken to be the consensus sequence, but the choice of substrate rarely makes any difference. All the epitopes at all the positions were taken and sorted according to how often they appear. Starting from the least frequent epitope.

[0108] Each epitope was “dropped” onto the substrate by replacing the characters in the substrate at the positions [t:t+k−1] with the characters in the epitope. When the most frequently occurring epitope was finally dropped onto the substrate, there was a string that was used as episensus solution q. Since the most frequent epitopes overwrite the rarer epitopes, a high epitope coverage was achieved. Since a single sequence q was always being updated, the final solution was composed of consistent epitopes.

[0109] The algorithm may not be fully deterministic because some epitopes might have identical frequencies, and if their positions are overlapping, the n the final result may depend on what order they are dropped. In implementation, the order that the sort algorithm gives is taken, but there is an opportunity to randomize those orders and to make multiple runs of the algorithm, with some runs possibly giving higher scores. The utility of this randomized multiple-run approach has not been investigated.

[0110] The solution only depends on the most frequent epitopes at each position, so for the example in Table 1, it will be a consistent combination of DEF, EFG, CHJ, HJL, JLM. If they are dropped in that order (first four have frequency 2, last one has frequency 3), DECHJLM [SEQ ID NO: 810] is obtained for which the score 0+0+2+2+3=7 beats the consensus but is less than optimal. If they were dropped in the order HJL, CHJ, EFG, DEF, JLM, DEFGJLM [SEQ ID NO: 811] would be obtained with a score of 2+2+1+1+3=9, which is the optimal score for this example. These two solutions are illustrated in FIG. 3.

[0111] The Aligned Cocktail of Vaccines (M>1) Problem.

[0112] In the original mosaic solution using genetic algorithm optimization, all M of the mosaic sequences are optimized at the same time.

[0113] Sequential Solutions.

[0114] One way to extend the M=1 episensus solutions to the M>1 problem is to modify the algorithms for optimizing total coverage to optimize complementary coverage. That is: given an episensus solution q₁, find q₂ that covers as many as possible of the remaining epitopes, not covered by q₁.

[0115] Iterative Refinement of Sequential Solutions.

[0116] Given initial solutions q₁, q₂, . . . , q_{M}, a new estimate for q₁ can be recomputed. This is done by starting with the original frequency values for each of the epitopes, but setting to zero those epitopes that are covered by q₂, . . . , q_{M}. The optimization of this complementary coverage problem leads to a new q₁. One can loop through all of the initial solutions this way, each time optimizing the complementary coverage.

[0117] Off-by-One Scoring.

[0118] The analysis shown so far gives credit to coverage only if an epitope in a sequence s is exactly matched by an epitope in a sequence q. But, particularly for longer epitopes, e.g., k=12, an epitope in a sequence may still be effective if it is an approximate match. For instance, agreement in 11 out of 12 characters may constitute satisfactory coverage.

[0119] Results.

[0120] These algorithms were compared using a dataset of 690 sequences.

[0121] FIG. 4 illustrates what the graph looks like for such a large dataset. FIG. 4 shows a graph associated with a dataset of 690 US B-clade Gag protein sequences (SEQ ID NOs. 1-690), each aligned to 556 positions. Results are shown in Table 2. Horizontal axis is the position t, and the columns of nodes indicate the different epitopes at each position. The nodes were arranged so that the most frequent are at the bottom. The nodes and edges (indicating consistency of adjacent nodes) are shown. The full graph is shown in (a); a close-up inset of the same graph is shown in (b).

[0122] Table 2 shows a comparison of coverage scores; this is fraction of the epitopes (k=12) in the sequences S that are covered (by exact match) by the epitopes in the vaccine sequences Q={q₁, . . . ,q_{M}}.

TABLE 2

| Algorithm | Episensus (M = 1) | M = 2 | M = 3 | M = 6 |
|---|---|---|---|---|
| Consensus | 0.5070 | — | — | — |
| Genetic Algorithm | 0.5072 | 0.6098 | 0.6643 | 0.7308 |

[0123] For the global EpiGraph solutions, single best EpiGraph sequences were determined based on the M group, B clade and C clade database sequences (including upto circa 2015), as well as the complementary 2^{nd} EpiGraph sequence for a bivalent vaccine, for Gag, Pol, and Nef. A novel advantage of the EpiGraph code over Mosaic design is that it allows the deliberate exclusion of rare epitopes, a feature included in the design of the new sequences, see figure below for an example of the impact of excluding rare variants from the M group. FIG. 5A-C illustrates the final values of EpiGraph and Tailored vaccines that were used.

### Example 2: Graphical Model for Optimal Epitope Coverage of Unaligned Sequences

[0124] A set S={s₁, s₂, . . . , s_{N}} of N unaligned protein sequences is taken to characterize the variability of a virus over a target population (e.g., a phylogenetic clade, a country, or global). A potential epitope is a subsequence of k amino acids (typically k=9). Each potential epitope, e, is assigned an integer frequency f(e) corresponding to the number of sequences in S in which e appears. The monovalent problem is to design a single artificial sequence q that resembles a natural protein but optimally covers the potential epitopes in the population S. Writing E(q) as the set of epitopes that appear in q, our measure of coverage is

Coverage(q)=Σ_{eεE(q)}f(e)/Σ_{eεE(s)}f(e)

[0125] The numerator is the sum of the frequencies of epitopes that appear in q, and the denominator normalizes by the sum over all epitopes that appear in any of the sequences in S. This formulation can be expressed as a directed graph. Each node in the graph corresponds to a distinct epitope e, and a directed edge connects two length-k epitopes (eₐ; e_{b}) if those epitopes overlap by k−1 characters. A path through the graph is a sequence of nodes e1, e2, with an edge from eᵢ to eᵢ₊₁ for i=1, . . . , L−1. Such a path corresponds to a sequence of L+k−1 characters, which is the artificial antigen q.

[0126] If this directed graph has no cycles, then EpiGraph finds a path through the graph that rigorously maximizes coverage, providing the optimal solution. Furthermore, this optimization is done with computational effort that scales only linearly with the size (as measured in nodes and edges) of the graph. In practice the directed graph created from S may not be acyclic, though it is often very nearly so, especially for larger values of k. For this case, the graph was “de-cycled,” by iteratively identifying cycles and then removing low-value edges until no cycles remain.

[0127] A polyvalent “cocktail” of m>1 antigens can be created by running EpiGraph sequentially, and optimizing complementary epitope coverage. This is achieved by treating the epitopes e that were included in the first antigens as if their frequencies were zero, and then running Epigraph on these modified frequencies. If any of the epitopes in the first antigens are required to complete a path (and generate a complete protein), they will still be available, but they will be disfavored, since they no longer contribute to the coverage score. This sequential solution can be improved using iterative refinement.

### Example 3: Tailored Therapeutic Vaccines

[0128] While it is not feasible to build a designer vaccine for each subject, it is feasible to sequence virus from that subject to try to get a good match from within a small reference set of vaccine options. The first thing considered was a US-based B clade trial population, focusing on the Gag protein. A Southern African based reference vaccine set, and a global vaccine set were designed, as well as an updated US-based B clade design. p24 is the most highly conserved sub-protein in Gag and can be excised from the larger Gag protein to provide a conserved region of ˜230 amino acids in length. A conserved region approach was also considered as an alternative to Gag, perhaps focusing on regions in Gag and Pol, possibly including the conserved stretch of Nef as well as any other proteins of interest.

[0129] This is a very different optimization question from trying to design a set that provides optimal population coverage for a prophylactic vaccine. In the prophylactic case, it is not known which viruses might be encountered by the vaccinee. In a therapeutic case the infecting virus sequence can be obtained and matched.

[0130] Optimization was done considering two things: first, to maximize the matches from a subject's infecting viruses and second, to minimize the mismatches so that the vaccine response is as targeted as possible on the relevant epitopes.

[0131] The phylogeny within HIV major clades tends to have little clear structure.

[0132] Rather it is a “starburst” with very long external branches, and very short poorly defined internal branches near the base. Part of this structure is likely due to intra-subtype recombination. While that is hard to quantify, recombination is certainly occurring relatively frequently, and by analogy with what is seen in terms of inter-subtype recombination, it is likely to be extensive. Given the structure of the tree, simply using clustering on a phylogenic tree to define the reference set of possible vaccines will not be as effective because within-clade associations are of limited meaning from an “epitope perspective”. Instead, sequence relationships should be considered by the relevant measure, and the reference set should be selected based on potential epitope similarities between natural strains and putative vaccine designs.

[0133] 12-mers were optimized considering class II epitopes, but the code can use any length k-mers as a reference point, where k is the putative potential epitope length. 9-mers were also used. In past work with the mosaics, the optimal solution for 9-mers has been very nearly optimal for other nearby lengths (8, 10, 11, 12), and that is expected to carry over with the new algorithms described here. 9-mers have been used for certain Tailored vaccine sets disclosed herein.

[0134] Optimality was defined in terms of k-mer coverage. This is defined by replacing each sequence with a “bag of epitopes,” i.e., an unordered list of all the k-mers that appear in the sequence. A bag of epitopes can be defined for a set of sequences by making a list of all k-mers that appear in any of the sequences in the set. The coverage of a given sequence S by a set of sequences Q={q₁, q₂, . . . , q_{N}} is given by the fraction of epitopes in S's bag that are also in the collective bag of the Q sequences, where Q might be a polyvalent combination in a vaccine cocktail. It is this coverage that was optimized. Another quantity of interest was the fraction of epitopes in the Q-bag that are not in the S-bag. Although it is not (currently) used directly in the optimization, a smaller fraction of these extraneous epitopes is preferred, and these numbers are calculated for comparisons and experimental design.

[0135] Six (6) ways of finding “central sequences” were evaluated when performing clustering for a Tailored vaccine incorporated into the Tailored vaccine analyses code (see below). An EpiGraph solution was deemed best, and was used for the final code. Several clustering strategies were also tried.

Here are the strategies tested to define amino acid based central sequences of clusters:

[0136] 1) Consensus: The consensus was a common standard, obtained by concatenating the most common amino acid in an alignment.

Potential Epitope (k-Mer) Based:

[0137] 2) Episensus: This approach solves for a single central sequence within a population or within a cluster. Two algorithms were tested for finding the episensus. The first is the drop-in-place algorithm. This starts with the consensus as a “substrate”. Excluding very rare k-mers, (those that are only found 1 time in the population), start with rare low frequency variants and replace the consensus k-mers with the rare variant, then keep replacing with variants, going up through the list of all k-mers based on their frequency, replacing and overwriting with more and more frequent variants until the most frequent variants across k-mers are left “standing”; overlapping k-mers with higher frequency will naturally tend to override peptides that overlap with lower frequencies. The second algorithm is EpiGraph, was described in Example 1. Epigraph sequences are more quickly calculated than GA mosaics, and so were readily incorporated into a clustering algorithm required to design a Tailored vaccine. In an experiment with a set of 690 aligned sequences of 556 amino acids that comprise the Gag protein (SEQ ID NOs: 1-690), the EpiGraph solution was very close to a consensus, and was also very close to the single best mosaic, with only one amino acid difference from the other two centroids.

[0138] 3) Sequential: This approach solves for a set of N vaccine option sequences. Here, the episensus is first defined for the population, and this is q₁. Next, all k-mers that are already covered by q₁ are excluded, and the approach solves for the second sequence in the series by the same drop-in-place process, to yield q₂. Then all k-mers already covered by q₁ and q₂ are excluded, and the approach solves for q₃ and so on until it has been solved for a set of N sequences, each including ever rarer versions of the potential epitopes.

[0139] 4) Iterative: This is an iterative version of the sequential algorithm. It also produces a set of N vaccine option sequences, usually with better coverage than the sequential approach, but without the preferential ordering that the sequential algorithm produces. Starting with a sequential solution q₁, q₂, . . . , q_{N}, all the epitopes that are in the data sequence set are identified, and then the epitopes that are covered by q₂, . . . , q_{N} are excluded. By solving for the episensus using the remaining (non-excluded) epitopes, a new value is obtained for q₁. The next step does the same thing with q₂, excluding epitopes in q₁, q₃, . . . , q_{N}. And so on for q₃ through q_{N}.

[0140] 5) Mosaic (GA mosaic): defined using the original genetic algorithm (GA). Mosaic refers to the genetic algorithm termed Mosaic and/or antigen sequences produced by the GA. Here, a set of mosaics of size N are solved for all at once, or the best single mosaic can be solved for, fixed, and solved for a complementary set of 5 to make a total of 6 vaccine option sequences. This strategy was employed to enable direct comparisons with clustering strategies described below.

[0141] 6) Best natural: This approach solves for a set of N vaccine option sequences. The natural strain in a set is identified that is most “epitope centric”, i.e. it has the most common k-mers. To find it, for every k-mer in a given natural strain, a frequency can be assigned to that specific form based on its frequency in the population, and then sum the frequencies as a measure of how well the natural strain covers the population. The natural strain with the highest score is the best single strain, Nat.1. Then, the k-mers that are covered by Nat.1 can be eliminated from the scoring scheme, and the best complement to Nat.2 can be picked by finding the best natural strain for epitope coverage excluding those epitopes already covered by Nat.1. This is done iteratively, so k natural strains are picked, where k is the number of vaccine options wanted to be considered, and they are ordered so Nat.1 is the best single strain, Nat.2 the best complement to Nat.1, Nat.3 the best complement to (Nat.1+Nat.2).

[0142] Vaccine options have been explored that are designed according to the following general strategies, comparing new ideas to specifically address therapeutic vaccine population sequences that have been designed in the past to optimize for population coverage.

[0143] If all subjects were to get the same vaccine (this might work better with conserved regions only), sequencing and tailoring are not done—these are universal designs, not optimized for each individual:

[0144] Consensus: Find a single universal sequence that best covers the population. Candidates for this 1-universal sequence included: a population consensus, the best single GA mosaic, the episensus, and the most “epi-centric” natural strain.

[0145] EpiGraph: Find either 2 or 3 population-based sequences and give them to everyone in the population. This population-based strategy was compared using the GA mosaic, the best natural strains, and the sequential and iterative mosaic solution. Since EpiGraphs are now available, and an improvement over Mosaics as we can also exclude rare epitopes, we use them.

[0146] In contrast, for a Tailored vaccine, each individual would get only the vaccine sequences that best matched his or her infection: Manufacture, for example, 6 vaccine antigen sequences, and pick the best one, or the best combination of 2 or 3 from among those 6 for delivery to the patient; i.e., choose those that provide the best coverage of a patient's infecting strain, with the fewest mismatched epitopes. Several strategies for this scenario were explored.

[0147] a. Cluster sequences with a k-means-like strategy to create 6 clusters, 1500 iterations were done (each of these iterations was a trial split-and-merge step followed by a few regular iterations) for the final sets, defined centroid sequences from these 6 clusters for vaccine sets. The distance between two sequences was defined as one minus the coverage of one sequence's epitopes by the other sequence. Initially, 6 randomly selected natural strains were used to seed the clusters. This gave a very highly related set of 6 centroid sequences. It was determined that if more natural diversity was represented, this would create a better set of reagents to create tailored vaccines. Next, the 6 clusters were seeded with most complementary 6 natural (Nat6) strains as these are very distinctive, and then reassigned the center based on the clusters as the episensus, and iteratively re-clustered, and re-centered. This strategy was compared to starting with the 6 best natural strains and using a consensus as the cluster centroid instead of the episensus, and the episensus gave slightly better coverage. Enforcing a minimum cluster size also gave slightly better coverage (1, 5 and 20 as minimum cluster sizes were tried), so a minimum cluster size was incorporated as a constraint. A minimum size of 20 was better than 1 or 5. To implement a minimum size, if in a given cycle the number of sequences in a cluster size falls below the minimum size, the members of this “too-small cluster” are each reassigned to best centroid from the other five clusters. To make a new cluster to replace the one that was lost, the cluster that has the greatest average distances to its centroid was split by taking two random natural sequences from within the cluster as centroids and reforming two clusters about them, recalculating the centroids, and going on to the next step with these new six clusters. The centroids of these clusters were very close to the center of the tree. It was determined from the sequences that this is due to replication of the consensus repeatedly within the clusters dominating the signal.

[0148] b. Episensus+(5 cluster centers). Here, the central sequence was first defined for the whole population using the EpiGraph algorithm (the population episensus), fixed for inclusion as a vaccine reagent. Any epitopes that match the population episensus were excluded from clustering considerations. Sequences are clustered as before, with a minimum size but this time 5 clusters based on all potential epitopes except those found in the episensus, so the clusters complement the population episensus, were targeted. This was determined to be the best solution for Gag. By including the population episensus in each subject's tailored vaccine, even if a given most common k-mer is not evident in their sampled HIV sequences, it might be lurking or a common form for reversion, given HIV's frequent amino acid toggling between common forms. The second complementary sequence from one of the 5 clusters would then add to the variant cross-reactive potential between the vaccine and the infecting strain.

[0149] c. Fix the best EpiGraph, add 5 mosaic complements to get a set of six (the 5 added are not ordered), or fix the best natural, add 5 natural in series.

[0150] After extensive comparisons and refinements, we favored using the EpiGraph algorithm to define the center of clusters for Tailored vaccines. A set of 6 Gag protein antigens for manufacture in a Tailored design, targeting either a global M group vaccine, a contemporary B clade vaccine, and a contemporary C clade vaccine for Southern Africa are provided. A comparison of coverage of natural contemporary B clade sequences using 2 natural B clade sequences, M group EpiGraphs, B clade EpiGraphs, or B clade tailored is shown in the FIG. 6A-B; B clade Tailored designs provide the best epitope coverage.

[0151] The various scenarios can be summarized with a few numbers as seen in Table 3, which are denoted M, C, T, A, and P. These are described below in terms of the number of “pills” (ie, vaccine antigens) for each category:

[0152] M=Manufactured, total number of pills created, from which some subset is chosen for each individual. (Typically, we imagine M=6 or fewer.)

[0153] C=Common, those pills that everybody gets, possibly in addition to some tailored pills.

[0154] T/A=Tailored/Alternatives, T is the number of tailored pills (out of A alternatives) that are given to each individual, possibly in combination with some common pills.

[0155] P=Per-subject total (T+C), the number of pills given to each individual.

TABLE 3

| | | | | | | | |
|---|---|---|---|---|---|---|---|
| | | | | | COVER | EXTRA | DELTA |
| Centroid | P | C | T/A | M | >good | >bad | >good |

Common: everyone gets the same population-based vaccine:

| | | | | | | | |
|---|---|---|---|---|---|---|---|
| Consensus | 1 | 1 | 0/0 | 1 | 0.5070 | 0.4913 | 0.0157 |
| 1-GA Mosaic | 1 | 1 | 0/0 | 1 | 0.5072 | 0.4911 | 0.0161 |
| Episensus | 1 | 1 | 0/0 | 1 | 0.5065 | 0.4918 | 0.0147 |
| Natural | 1 | 1 | 0/0 | 1 | 0.4793 | 0.5191 | −0.0398 |
| 2-GA Mosaic | 2 | 2 | 0/0 | 2 | 0.5960 | 0.6692 | −0.0732 |
| 2-iterMosaic | 2 | 2 | 0/0 | 2 | 0.5965 | 0.6346 | −0.0381 |
| 2-Natural | 2 | 2 | 0/0 | 2 | 0.5473 | 0.6584 | −0.1110 |
| 3-GA Mosaic | 3 | 3 | 0/0 | 3 | 0.6346 | 0.7424 | −0.1078 |
| 3-iterMosaic | 3 | 3 | 0/0 | 3 | 0.6534 | 0.7190 | −0.0656 |
| 3-seqMosaic | 3 | 3 | 0/0 | 3 | 0.6429 | 0.7119 | −0.0690 |
| 3-Natural | 3 | 3 | 0/0 | 3 | 0.5941 | 0.7308 | −0.1367 |
| 6-interMosaic | 6 | 6 | 0/0 | 6 | 0.7205 | 0.8324 | −0.1119 |
| 1 + 5-GA Mosaic | 6 | 6 | 0/0 | 6 | 0.7048 | 0.8241 | −0.1193 |
| 6-Natural | 6 | 6 | 0/0 | 6 | 0.6628 | 0.8104 | −0.1476 |

[0156] In Table 3, the single underlined numbers indicate that on average >60% of the 12-mers in natural sequences are covered by the vaccine (GOOD), while the double underlined numbers indicate that over 70% of the 12-mers on average are not present in the natural stains.

[0157] Tailored—Choose the Best 1 of 6 for Each of the 690 Population Sequences:

[0158] Not much better (0.54 vs 0.51) than just making one for the whole population, but C6-epi is the best of class if 6 vaccines were going to be made, and give one of the six to a subject based on their sequence.

| | | | | | | | |
|---|---|---|---|---|---|---|---|
| C6-epi | 1 | 0 | 1/6 | 6 | 0.5366 | 0.4616 | 0.0750 |
| 1 + 5-Epi-C5 | 1 | 0 | 1/6 | 6 | 0.5079 | 0.4904 | 0.0175 |
| 1 + 5-GA Mosaic | 1 | 0 | 1/6 | 6 | 0.5083 | 0.4900 | 0.0183 |
| 1 + 5-iterMosaic | 1 | 0 | 1/6 | 6 | 0.5074 | 0.4909 | 0.0165 |
| 6-iterMosaic | 1 | 0 | 1/6 | 6 | 0.3979 | 0.6008 | −0.2029 |
| 6-Natural | 1 | 0 | 1/6 | 6 | 0.4863 | 0.5122 | −0.0259 |
| C6-NaturalSeed | 1 | 0 | 1/6 | 6 | 0.5291 | 0.4692 | 0.0599 |

Tailored Best Pair from a Group of Six

| | | | | | | | |
|---|---|---|---|---|---|---|---|
| C6-epi | 2 | 0 | 2/6 | 6 | 0.5785 | 0.5313 | 0.0472 |
| 1 + 5-Epi-C5 | 2 | 0 | 2/6 | 6 | 0.6255 | 0.6310 | −0.0055 ** |
| 6-interMosaic | 2 | 0 | 2/6 | 6 | 0.5552 | 0.6859 | −0.1307 |
| 6-seqMosaic | 2 | 0 | 2/6 | 6 | 0.6075 | 0.6331 | −0.0256 |
| 1 + 5-GA Mosaic | 2 | 0 | 2/6 | 6 | 0.5932 | 0.6401 | −0.0469 |
| 6-Natural | 2 | 0 | 2/6 | 6 | 0.5759 | 0.6431 | −0.0672 |

Hybrid tailored pair: fix the population center, add 1 of 5 centroids to

[0159] best complement a fixed sequence to cover each of the test sequences—

| | | | | | | | |
|---|---|---|---|---|---|---|---|
| 1 + 5-Epi-C5 | 2 | 1 | 1/5 | 6 | 0.6255 | 0.6310 | −0.0055 ** |
| 1 + 5-GA Mosaic | 2 | 1 | 1/5 | 6 | 0.5922 | 0.6394 | −0.0472 |
| 1 + 5-Natural | 2 | 1 | 1/5 | 6 | 0.5724 | 0.6395 | −0.0671 |
| 6-seqMosaic | 2 | 1 | 1/5 | 6 | 0.6071 | 0.6330 | −0.0259 |
| 6-iterMosaic | 2 | 1 | 1/5 | 6 | 0.5280 | 0.7039 | −0.1759 |

Hybrid best three—fix the population center, and 2 of 5 centroids to best complement a fixed sequence so cover the test sequence.

| | | | | | | | |
|---|---|---|---|---|---|---|---|
| 1 + 5-Epi-C5 | 3 | 1 | 2/5 | 6 | 0.6590 | 0.6868 | −0.0278 |
| HBP-6-iterMosaic | 3 | 1 | 2/5 | 6 | 0.6586 | 0.7079 | −0.0493 |
| HBP-1 + 5-GA Mosaic | 3 | 1 | 2/5 | 6 | 0.6447 | 0.7155 | −0.0708 |

Common: Everyone gets the same population-based vaccine, either 1 or 2 vaccine antigens are delivered:

| | | | | | |
|---|---|---|---|---|---|
| Common | Natural | 1 | 1 | 0.4793 | 0.5191 |
| Common | Mosaic | 1 | 1 | 0.5072 | 0.4911 |
| Common | 2-Natural | 2 | 2 | 0.5473 | 0.6584 |
| Common | 2-GA Mosaic | 2 | 2 | 0.5960 | 0.6692 |
| Common | 2-iterMosaic | 2 | 2 | 0.5965 | 0.6346 |
| Tailored | C6-epi | 2 | 6 | 0.5785 | 0.5313 |
| Tailored | 1 + 5EpiC | 2 | 6 | 0.6341 | 0.6361 |
| Tailored | 1 + 5EpiC5 | 3 | 6 | 0.6590 | 0.6868 |
| Common | 3-GA Mosaic | 3 | 3 | 0.6346 | 0.7424 |

### Exact Match 1+5-Epi-05:

| | |
|---|---|
| Optimized for 9 | Optimized for 12 |

| | COVER | EXTRA | COVER | EXTRA |
|---|---|---|---|---|
| Evaluated for 9 | 0.7098 | 0.5744 | 0.7066 | 0.5535 |
| Evaluated for 12 | 0.6301 | 0.6525 | 0.6341 | 0.6361 |

### And Off-by-One Considered a Match 1+5-Epi-05:

| | |
|---|---|
| Optimized for 9 | Optimized for 12 |

| | COVER | EXTRA | COVER | EXTRA |
|---|---|---|---|---|
| Evaluated for 9 | 0.9207 | 0.1783 | 0.9183 | 0.1723 |
| Evaluated for 12 | 0.8722 | 0.2590 | 0.8708 | 0.2474 |

** these are likely the best solution. A population episensus was made, the 12-mers found in the episensus for clustering were excluded. When the population episensus is fixed and the best episensus of the other 5 complementary clusters is picked to pair with it, the exact same answer is obtained as when the best pair among those 6 variants was picked. This means the population episensus was always one of the best pair.

[0162] Off by One:

[0163] For the estimates above, only perfect matches were considered, for an epitope to match between a vaccine cocktail and a natural strain, a perfect 12/12 match was required. Mismatches are often well tolerated, particularly for class II epitopes, if a match requires 11/12 agreement, a mismatch is 10/12 or less, things look more optimistic. The truth is probably somewhere in between, and 10/12 may be acceptable is some cases as well. Here the likely best option is compared to a comparable best natural strain option, with perfect matches:

Perfect Match (Extracted from the Table Above):

| | | | | | | | |
|---|---|---|---|---|---|---|---|
| 1 + 5-Epi-C5 | 2 | 1 | 1/5 | 6 | 0.6255 | 0.6310 | −0.0055 ** |
| 1 + 5-Natural | 2 | 1 | 1/5 | 6 | 0.5724 | 0.6395 | −0.0671 |

### And Off-by-One Considered a Match:

| | | | | | | | |
|---|---|---|---|---|---|---|---|
| 1 + 5-Epi-C5 | 2 | 1 | 1/5 | 6 | 0.8700 | 0.2524 | 0.6176 |
| 1 + 5-Natural | 2 | 1 | 1/5 | 6 | 0.8412 | 0.3112 | 0.5300 |

[0165] Three pills, one general (same for everybody). And two tailored pills, the best pair of the remaining five.

### Example 4: Design and Optimization of a Clade B HIV-1 “Tailored” Antigen Cocktail

[0166] HIV diversity at the population level begins with rapid evolution within each infected host. Much of the within host diversity is a direct consequence of immune escape (Bar, K. J. 2012. PLoS Pathog 8:e1002721., Liu, M. K. 2013. J. Clin. Invest. 123:380-93, and escape variants arise soon after infection (Fischer, W. 2010. PLoS One 5:e12303). The goal of prophylactic vaccines is to rapidly eliminate the infecting strain or prevent it from infecting in the first place. Since it is not known which strain will be transmitted, prophylactic vaccines have to elicit immune responses that would be active against any variant that might be encountered. In contrast, an immunotherapy can be directed against a known viral population present within a given host. Prophylactic and therapeutic HIV vaccines thus have to be designed with these distinct requirements in mind. As shown in FIG. 7, mosaic solutions approach the maximum possible epitope coverage for a given HIV population. The figure also reveals differences in the conservation of HIV proteins, with large segments of Gag, Nef and Pol being highly conserved whereas most of Env as well as most small, auxiliary proteins (data not shown) are highly variable. While mosaics offer a near optimal solution for epitope coverage in a population for a prophylactic vaccine, they do not exploit the added information of knowing the sequence of the infecting strain targeted in a therapeutic setting.

[0167] The implementation of a tailored vaccine design strategy requires manufacturing a manageable number of vaccine reagents that maximally capture the epitope diversity of the target population, sequencing HIV from the infected vaccine recipient, and then selecting from among the vaccine reagent pool the subset of antigen inserts that best matches the subject. The tailored vaccine strategy is thus conceptually distinct from mosaic vaccine design.

[0168] 98% of approximately 150,000 HIV sequences that have been sampled in the U.S. are clade B. The US-sampled B-clade Gag sequences currently available from the Los Alamos HIV database were used. There were 690 intact Gag sequences in this set (SEQ ID NOs. 1-690), each derived from a different infected subject, representing a cross-section of the diversity in US HIV strains. To maximize T cell epitope coverage in a hypothetical vaccine while fixing the number of different Gag sequences that need to be contained in a vaccine cocktail, a novel computational strategy was devised that couples the use of an epitope-based consensus (or “episensus”) sequence algorithm with k-means-like clustering. Unlike a simple consensus sequence, which takes the most common amino acid in each position of the alignment, the episensus seeks the most common epitope (e.g., 12-mer) starting in each position of the alignment. However, one cannot simply take the most common epitope at each position, because the epitopes overlap, and that can lead to conflicts in nearby amino acids. The goal is to deal with those conflicts in a way that leads to maximal epitope coverage of a population by a vaccine.

[0169] To define a small set of antigens for manufacture that represent the population epitope diversity, a k-means like approach was used to partition the 690 Gag sequences into distinct clusters based on epitope similarity, and separate episensus sequences were generated for each cluster to serve as the central sequence of the cluster. Coverage of individual variants levels off after 5-6 clusters, and 6 vaccine vectors with 6 HIV antigen variants is feasible to manufacture, so a set of 6 antigens was initially targeted. The algorithm starts with 6 randomly selected natural strains as initial centroid sequences, and assigns each of the remaining sequences to whichever of the 6 is closest. Within each of the 6 clusters, a new centroid sequence is computed, based on the episensus of the sequences in that cluster. All of the sequences are then re-assigned according to which of the new centroids is closest. This process converges to a k-means-like optimization for the design of the 6 vaccine antigens, which are taken to be the episensus centroids of the individual clusters, and these antigens could be used as a manufactured set, from which to select those that provide the best-match for a given vaccine.

[0170] A hybrid approach was found to substantially improve epitope coverage, while minimizing increases in potential vaccine-specific responses. In the hybrid strategy, the central sequence was computed for the whole population (the population episensus), and subsequent clustering was based exclusively on epitopes that were not found in the central sequence. In this way, the cluster episensus sequences complement the population episensus. Thus, the 6-sequence reagent pool consists of the one population episensus and five complementary-cluster centroid sequences, and subjects would be given a two-antigen tailored vaccine, the population episensus paired with the best complementary sequence. This strategy yielded more diverse sequences in the reference set, and improved potential coverage of natural Gag sequences in the test population as seen in Table 4.

TABLE 4
Average per-strain coverage of potential epitopes in US clade B Gag by
different vaccines.

| | | | | % non- | |
|---|---|---|---|---|---|
| | | | % matched to | matched to | Improvement |
| Vaccine | Delivered | Manufactured | natural Gag | natural Gag | factor |
| 1 Natural | 1 | 1 | 47.9 | 51.9 | |
| 1 Mosaic | 1 | 1 | 50.7 | 49.1 | 1.06 |
| 1 Episensus | 1 | 1 | 50.7 | 49.1 | 1.06 |
| 2 Natural | 2 | 2 | 54.7 | 65.8 | 1.14 |
| 2 Mosaic | 2 | 2 | 59.6 | 66.9 | 1.24 |
| 2 Tailored | 2 | 6 | 63.4 | 63.1 | 1.32 |
| 3 Natural | 3 | 3 | 59.7 | 73.1 | 1.35 |
| 3 Mosaic | 3 | 3 | 63.4 | 74.3 | 1.32 |
| 3 Tailored | 3 | 6 | 65.9 | 68.7 | 1.37 |
| 6 Natural | 6 | 6 | 66.3 | 81.0 | 1.38 |
| 6 Mosaic | 6 | 6 | 72.1 | 83.2 | 1.51 |

[0171] A tailored vaccine, 2- or 3-antigen design, was made for each of the 690 variants, selected from the population episensus and the 5 cluster derived complementary sequences. This was compared to the potential epitope coverage of population-based vaccine strategies where every vaccinee would be given the same vaccine, either mosaic or best-natural combinations. “Delivered” indicates the number of antigens that would be included in a vaccine cocktail. “Manufactured” indicates the size of the reference pool of vaccine antigens that would need to be synthesized to choose among for the tailored approach to be used. The “% matched” indicates the average number of potential epitopes perfectly matched between each of the natural Gag variants and the vaccine; the higher this value, the more likely vaccine responses will be cross-reactive with natural variants. The “% non-matched” represents the fraction of potential epitopes in the vaccine that are not found in a given natural Gag sequence, calculated for each of the 690 sequences separately then averaged. The higher this value, the greater the potential the vaccine to elicit vaccine-specific responses that may detract from cross-reactive responses. The improvement factor indicates the increase in coverage using the proposed new vaccine design options, over using a single best natural strain.

[0172] The tailored vaccine solutions optimized on 12-mers are nearly optimal for 9-mers, and vice-versa, so clusters based on 12-mers should work well for both class I and class II epitope presentation as seen in Table 5.

TABLE 5
Allowing a single amino acid mismatch in the 9mer or 12mer evaluation
to be considered as a positive match when calculating the average
coverage of a 2-protein tailored design.

| | Optimized for 9mer | | Optimized for 12-mer | |
|---|---|---|---|---|
| | | % Non- | | % Non- |
| | % Matched | matched | % Matched | matched |
| Evaluated for 9-mer | 92.07 | 17.83 | 91.83 | 17.23 |
| Evaluated for 12- | 87.22 | 25.90 | 87.08 | 24.74 |
| mer | | | | |

[0173] Finally, the tailored vaccine approach theoretically does very well if 1 out of 12 mis-matches are tolerated in potential epitopes, rather than requiring identity (Table 5); given this more lenient, and perhaps biologically more realistic, measure, approximately 90% of vaccine responses to tailored vaccines may be cross-reactive with epitopes in matched natural Gags. The tailored vaccine approach was superior to population mosaics, consensus sequences, and the best natural strains in terms of both maximizing epitope coverage of Gag sequences, and minimizing potentially deleterious vaccine-specific epitopes (FIG. 8). The code can also be applied to tailoring vaccines using multiple sequences rather than use one representative each from infected individuals, and applying the tailored vaccine design strategy to different populations (the C clade epidemic in Southern Africa, the 2-clade regional epidemic in Thailand, and global M group set) are explored.

[0174] Tailored vaccine antigens can provide better coverage (compared to population-based antigens) of natural sequences when the infecting strain is known.

### Example 5: Dual Expression Vectors

[0175] Using the population episensus antigens and/or the tailored antigens described herein, dual expression vectors are generated, with each expressing a complete Gag antigen and a second HIV antigen. The second HIV antigen can be, for example, a fusion protein of reverse transcriptase (RT) and the central part of Nef. Integrase is not included, as it is a rather poor stimulator of T cell responses. Using CMV vectors (e.g., RhCMV or HCMV vectors) as dual expression vectors, it is possible to simultaneously induce T cells to two different SIV or HIV antigens.

[0176] For example, panels of up to six HCMV vectors containing tailored Gag sequences based on the EpiGraph algorithm developed are generated (one vector expressing a Gag population episensus antigen and five vectors that each express a complementary cluster-based Gag antigen), and panels of antigens covering RT and the central region of Nef are also designed. One vector expressing a Gag population episensus antigen plus two vectors each expressing a different Gag antigen can be selected from among the five complementary cluster-based antigens are provided. These vectors can also contain one of two complementary HIV-1 EpiGraph RT/nef sequences. When tailoring is not predicted to improve coverage due to the high conservation of these sequences, the 2-mosaic solution are retained and used for the vector. For example, one RT/nef mosaic is included in the population episensus vector and the other is used in the tailored vectors. A panel of HCMV-based vaccine vectors that can enter vaccine production is generated by sequencing the resulting vectors and characterizing them for antigen expression and growth in vitro.

[0177] Synthetic codon-optimized DNA inserts are generated corresponding to Gag, RT and Nef mosaic and the tailored antigens designed in Example 3.

### Example 6: Transient Expression of Viral Antigens Developed Using the EpiGraph Approach

[0178] Antigens designed to maximize the epitope frequency using the EpiGraph algorithm resemble natural sequences but no longer code for native proteins. While the theoretical guidelines for expression of these artificial sequences are adhered to in the construction of these sequences, proteins encoded by them may exhibit unanticipated expression profiles or fail to express a stable full length protein.

[0179] To evaluate the expression profile of these sequences in the context of mammalian cells EpiGraph sequences were synthesized and cloned for transient transfection. DNA encoding these constructs was synthesized (Genscript, Piscataway, N.J.) to contain compatible cloning sites for plasmid vectors (pcDNA3.1 and pOri). All inserts were codon optimized for the respective host (rhesus, SIV or human, HIV). Each construct was also modified to eliminate residual enzyme activity of the native sequence as described in Kulkarni et al. Vaccine (2011). Positions deleted were based on the amino acid sequence relative to Clade B EpiGraph-1. Amino acids deleted include; “DTG” associated with protease activity (positions 81-83), “YMDD” associated with reverse transcriptase activity (positions 338-341), “E” associated with RNaseH activity (position 633), “D” associated with Integrase activity (position 779), “D” associated with Integrase activity (position 831), and “E” associated with Integrase activity (position 867). Synthetic DNA was rehydrated in water and digested with restriction endonucleases (5′ NheI, 3′ BamHI) followed by heat inactivation. The plasmid vector was linearized with compatible endonucleases and treated with calf intestinal phosphatase to prevent recircularization of empty vector. Vector and insert fragments were resolved by agarose gel electrophoresis to confirm digest fragment sizes and cleaned for ligation by PCR purification kit (Thermo Scientific). Inserts were ligated to linearized vector at approximately 3:1 insert to vector ratio for 15 minutes at room temperature using a rapid ligation kit (Roche, Indianapolis, Ind.), transformed into chemically competent E. coli (DH5-alpha), and plated on antibiotic selection plates. DNA from resulting colonies was screened by restriction digestion for inserts.

[0180] Clones containing each of the correct inserts in the appropriate orientation relative to vector promoter and poly(A) sequences were grown in liquid culture for plasmid DNA purification. Actively growing sub-confluent Hela cells in 12 well tissue culture plates received 500 ul of fresh media (DMEM 10% FBS) while liposomes were prepared. To generate liposomes containing plasmid DNA, 250 ul of serum free media was mixed with 500 ng of plasmid DNA, and 250 ul of serum free media was mixed with 2 ul of lipid (Lipofectamine 2000, Invitrogen). After 5 minutes incubation at room temperature these solutions were combined, mixed, and incubated for 20 minutes. The DNA containing liposomes (500 ul) formed during this process were added dropwise to the culture and allowed to incubate 12-16 hours after which time the transfection mixture was replaced with fresh media. After an additional day of incubation cultures were harvested by scraping and centrifugation. Supernatants were removed by aspiration and cell pellets lysed by resuspension in 100 ul gel loading dye containing 5% SDS and 10% 2-mercaptoethanol and centrifugation through QiaShred column (Qiagen, Valencia, Calif.).

[0181] Expression of EpiGraph proteins was demonstrated by SDS poly-acrylamide gel electrophoresis (SDS-page) and western blotting developed with antibodies to the V5 or hemagglutinin epitope tag engineered into each construct. Briefly, 10% polyacrylamide gels were prepared and loaded with 10 ul (10% of each sample) and electrophoresed at 110-120 volts for 90 minutes. The resolved proteins were transferred to PVDF membranes by semi-dry blotting at 20 volts for 45-50 minutes. Non-specific binding was blocked with a solution of 10% nonfat dry milk in phosphate buffered saline with 0.1% tween-20 (PBS-T) for 60 minutes. HA (Sigma) or V5 (Santa Cruz) antibodies were diluted in 5% milk solution and incubated with membranes for 1 hour followed by 3 washes with PBS-T prior to addition of 1:2000 dilution of horseradish peroxidase conjugated goat anti-mouse (Santa Cruz) secondary antibody for 1 hour. Subsequently blots are washed three times in PBS-T and developed with enzyme linked chemi-luminescence (ECL kit (Thermo-Pierce) and visualized with X-ray film.

[0182] All the tested constructs demonstrated robust transient expression for proteins of the predicted molecular weight and confirmed their utility for testing in the CMV vector backbone. (for example, see FIGS. 9A-C).

### Example 7: Engineering of EpiGraph Designed Antigens into CMV Vector BAC Constructs and Expression from Reconstituted Virus

[0183] EpiGraph antigens were designed to maximize the coverage of T-cell epitopes representative of the spectrum of viral sequences and clades of HIV from which they were generated. To utilize these antigens most effectively they have been engineered into CMV vectors which have demonstrated three times the CD8⁺ T cell spectrum of competing platforms. Broad antigen presentation and lifelong expression profiles of CMV vectors have demonstrated the capacity to protect and cure rhesus monkeys infected with SIV. The EpiGraph antigen design algorithm in combination with CMV vectors may provide even greater coverage of HIV within and across clades when applied to broadly prophylactic vaccines or tailored focused vaccines.

[0184] EpiGraph sequences which were demonstrated expression in transient transfection systems were sub-cloned into the recombination plasmid (pOri) and transferred to CMV backbones using BAC recombineering. (Messerle et al. Proc Natl Acad Sci USA. 1997 Dec. 23; 94(26):14759-63; and Borst et al. J Virol. 1999 October; 73(10):8320-9).

[0185] BAC recombineering facilitates the manipulation of large DNA sequences utilizing temperature and metabolite regulated recombination enzymes in the context of E. coli strain EL250 containing a parental BAC. Recombination is a sequential two-step process consisting of insertion of the antigen sequence with an antibiotic resistance gene (kanamycin) into the target region followed by removal of the kanamycin cassette. The insertion fragments are amplified by PCR from template DNA containing the antigen of interest plus kanamycin using primers with long (50+bp) homology arms.

[0186] To prepare the bacterial cells for the insertion step, five ml cultures were grown overnight at 30° C. in Luria Broth (LB) with chloramphenicol, and diluted up to 50 ml the following morning. Bacteria were grown for approximately 3-4 additional hours at 30° C. (to an OD=0.6), and then heat shocked by shaking at 42° C. for 15 minutes to induce the recombination enzymes. Following this induction, bacteria were pelleted (3000 rpm, 10 minutes, 4° C.) and then washed three times in ice-cold water. The E. coli cells were rendered electro-competent to receive the PCR product and recombination competent for insertion of the sequence into the target region of the BAC. Purified insert (500 ng) was combined with 100 ul competent E. coli on ice, moved to a 0.2 cm cuvette (Fisher), and electroporated using the Bio-rad MicroPulser apparatus. Following electroporation, the bacteria were diluted by addition of 900 ul LB culture media and allowed to recover at 30° C. for 2 hours prior to plating on chloramphenicol/kanamycin plates. Plates were incubated at 30° C. for two days and colonies were screened by restriction digest and PCR for recombination events.

[0187] BAC constructs positive for recombination proceeded to the second step where the kanamycin cassette was excised by arabinose induction of the Flip recombinase mediated by flanking FRT sites. Five ml cultures were grown overnight in LB+chloramphenicol and diluted 1:10 the following morning. After three hours of growth the bacteria were treated with L-arabinose (Arcos, 0.1% final concentration) and induced for 1.5 hours at 30° C. Following induction the bacteria were streaked on chloramphenicol plates and incubated for two days at 30° C. Colonies were then replica plated on chloramphenicol/kanamycin and chloramphenicol plates to screen for clones that had lost kanamycin resistance. These clones were further screened by restriction digest and PCR to confirm the construct.

[0188] Viral Reconstitution:

[0189] To regenerate virus, the BAC DNA was transferred into mammalian host cells permissive for viral growth. BAC DNA purified from 10 ml of an overnight culture was electroporated into approximately ⅕ of a confluent flask of telomerized fibroblasts (˜200,000 cells). In brief, cells were pelleted (1,500 rpm, 5 minutes) and resuspended in 700 ul Opti-Mem. This cell mixture was then added to 50 ul of BAC DNA and mixed gently before transfer to a 4 mm cuvette. Electroporation was done using the Bio-rad GenePulser II at 0.25 kV and 0.95 uF. Following electroporation, cells were plated into 100 mm dishes containing DMEM+10% FBS and media was changed the next day to remove cell debris. Cells were observed daily for the formation of plaques and harvested at full CPE. The remaining attached cells were harvested by cell scraper and pelleted by centrifugation (1,500 rpm, 5 minutes), and the supernatant containing reconstituted virus vector was retained for passage of the recombinant virus. Cell pellets were lysed by resuspension in 100 ul gel loading dye containing 5% SDS and 10% 2-mercaptoethanol and centrifugation through QiaShred column (Qiagen, Valencia, Calif.).

[0190] Viral EpiGraph Expression:

[0191] Expression of EpiGraph proteins were tested by SDS poly-acrylamide gel electrophoresis (SDS-page) and western blotting developed with antibodies to the V5 or hemagglutinin epitope tag engineered into each construct. Briefly, 10% polyacrylamide gels were prepared and loaded with 10 ul (10% of each sample) and electrophoresed at 110-120 volts for 90 minutes. The resolved proteins were transferred to PVDF membranes by semi-dry blotting at 20 volts for 45-50 minutes. Non-specific binding was blocked with a solution of 10% nonfat dry milk in phosphate buffered saline with 0.1% tween-20 (PBS-T) for 60 minutes. HA (Sigma) or V5 (Santa Cruz) antibodies were diluted in 5% milk solution and incubated with membranes for 1 hour followed by 3 washes with PBS-T prior to addition of 1:2000 dilution of horseradish peroxidase conjugated goat anti-mouse (Santa Cruz) secondary antibody for 1 hour. Subsequently blots were washed three times in PBS-T and developed with enzyme linked chemi-luminescence (ECL kit (Thermo-Pierce) and visualized with X-ray film.

[0192] All the tested constructs demonstrated robust stable expression for proteins of the predicted molecular weight, thus confirming their utility for immunogenicity testing in the rhesus CMV vaccine model. (for example, see FIG. 10A-B).

### Example 8 Population Epigraph Vaccines

[0193] The Epigraph algorithm were used to create a set of vaccine antigens using CMV vectors initially, however, other vaccine delivery systems can be utilized.

[0194] M group (global) was considered, as well as B and C clade (geographically limited use to regions where these particular clades are endemic). Gag, Pol and Nef Epigraph vaccine antigens were generated −. B and M group are expressed.

[0195] Basic Epigraph Design Attributes:

[0196] Epigraphs use a graph theory/dynamical programming approach to design antigens that maximize potential T-cell epitope (PTE) coverage. Under certain conditions they are mathematically optimal, and they are very computationally efficient. Epigraphs have an additional tangible benefit relative to Mosaic antigens, in that the benefit of excluding ever-more rare epitopes in the constructs can be balanced by tolerating minimal PTE coverage costs. These Epigraphs were designed with that in mind, allowing a slight coverage cost (0.005) to ensure that even the rarest epitopes represented in the Epigraph antigens were observed in many of the population sequences (the precise number depends on the input data set).

[0197] The input data sets for these Epigraphs were obtained from the HIV database sequence alignment set for each of the proteins, Gag, Pol and Nef, including one sequence per person, circa September 2014. Incomplete sequences were excluded. This left the following numbers of sequences for each protein set, Nseqs is the number of sequences in the input alignment:

| Nseqs | Clade | Protein |
|---|---|---|
| 1729 | B | Gag |
| 1780 | B | Nef |
| 1072 | B | Pol |
| 940 | C | Gag |
| 749 | C | Nef |
| 414 | C | Pol |
| 4596 | M | Gag |
| 4040 | M | Nef |
| 2780 | M | Pol |

[0198] Paired Epigraph antigen sets for a bivalent vaccine were sequentially solved using the Epigraph algorithm for unaligned sequences. The sequential solution was used, which allows the use of first Epigraph as a monovalent vaccine in isolation. This means that they are designed so that the best single Epigraph antigen, an “episensus”, is solved first to provide the optimal PTE coverage of a population, and then it is fixed for inclusion in the bivalent design. The complement is then solved to give best population PTE coverage by a bivalent pair of antigens that contain the first Epigraph, the episensus. The coverage costs were minimal relative to a simultaneous antigen solution.

[0199] An analysis was then performed to determine the coverage cost of excluding rare variants. The data is summarized in the following table. fₒ is rare epitope threshold. Sequences are produced after discarding all PTEs that appear in fₒ or fewer sequences. Put another way, every PTE that is in the vaccine has appeared in more than fₒ sequences. These values off, were made as large as possible while achieving a coverage that was within 0.005 of the maximum coverage achieved when fₒ=0. Nseqs is the number of sequences in the input alignment.

| Protein | Clade | Nseq | fₒ |
|---|---|---|---|
| Gag | B | 1729 | 41 |
| Gag | C | 940 | 21 |
| Gag | M | 4596 | 146 |
| Nef | B | 1780 | 50 |
| Nef | C | 749 | 14 |
| Nef | M | 4040 | 100 |
| Pol | B | 1072 | 34 |
| Pol | C | 414 | 11 |
| Pol | M | 2780 | 67 |

[0200] The basic Epigraph antigens were designed as full proteins, and these—were—expressed in CMV vectors and tested as either Gag/Nef fusion proteins, or Pol with deletions made for safety, or as the most conserved regions of Gag and Nef fused, or the most conserved regions of Pol fused. Lists of each of the full protein form for expression in the CMV vector are included below with examples for the M group and the B clade.

[0201] Conserved regions for vaccine antigens are excised from the full length Epigraph proteins.

[0202] The conserved regions within Gag, Pol and Nef were defined based on the potential for PTE coverage by a bivalent (i.e., 2 antigen) vaccine. That is, they were based on the potential for two optimized antigens to provide PTE coverage of the B clade. Sequences for the conserved regions are shown in the listing below. Boundaries were selected to capture the most conserved half of each the three proteins (Gag, Pol and Nef), in the longest contiguous fragment possible, so the conserved regions are interspersed with more variable sections. In Gag, the boundaries simply reflect the boundaries of the p24 Capsid protein.

### Example 9: Tailored Therapeutic Antigens

[0203] For Tailored antigens, either Gag or the most conserved part of Gag, p24 were used. For one design, the full M group 2015 alignments of 4596 sequences were used, to provide a global solution. An alignment of 189 contemporary B clade sequences were isolated in the US, or an alignment of 199 contemporary C clade sequences from Southern Africa. “Contemporary” refers to viruses that were isolated after 2004; all sequences sampled in the past decade were used to get a reasonable sampling of sequences from each region. Sequences that were not fully resolved or were incomplete were excluded. Regional subtype-specific contemporary viruses were selected because they represent good matches for populations that would be likely for initial proof of concept studies for evaluating for Tailored vaccines; by using single subtype regional sets we could limit the population diversity to enhance the potential for success of an HIV therapeutic vaccine.

[0204] These therapeutic vaccine antigens are designed for used in treatment scenarios where they could be matched, or “tailored”, to the sequenced infecting virus of the person who would receive the vaccine. 6 vaccine antigens would be manufactured, the best matched 2 or 3 from that set to the individuals infecting virus would be given to an individual to maximize matches between the vaccine and their infecting strain.

[0205] Thus full Gag for every epigraph is provided below, for manufacture of the 6 Tailored antigen solution, with p24 as bold face. Either Gag or the more conserved p24 could be used in a tailored vaccine.

[0206] Matched PTE scores and mismatched scores (number of extras), for delivery of the n best matched antigens out of a pool of m, for Gag proteins or the interior p24 region, where the n are selected to best cover each individual sequence in the target population. The target populations are the contemporary C clade infected population sampled in Southern Africa, or the contemporary B clade population sampled in the USA. The best solutions use a pool of m=6 antigens, and are bolded; these are the based on the six sequences shown above.

[0207] Epitope Coverage of Southern African C Clade Gag

| n m | Coverage | Extras | Vaccine evaluated against data set |
|---|---|---|---|
| 1 1 | 0.39886 | 318.437 | M Epigraph |
| 2 2 | 0.57907 | 681.980 | M Epigraph |
| 1 1 | 0.59591 | 200.809 | C Epigraph |
| 2 2 | 0.70758 | 550.618 | C Epigraph |
| 2 3 | 0.71875 | 559.206 | C Tailored |
| 3 3 | 0.73852 | 778.603 | C Tailored |
| 2 4 | 0.72609 | 550.397 | C Tailored |
| 3 4 | 0.75294 | 805.658 | C Tailored |
| 2 5 | 0.73124 | 549.452 | C Tailored |
| 3 5 | 0.75975 | 800.337 | C Tailored |
| 2 6 | 0.73440 | 527.623 | C Tailored |
| 3 6 | 0.76513 | 767.759 | C Tailored |

[0208] Epitope Coverage of Southern African C Clade p24

| n m | Coverage | Extras | Vaccine evaluated against data set |
|---|---|---|---|
| 1 1 | 0.48548 | 114.739 | M Epigraph |
| 2 2 | 0.76864 | 230.593 | M Epigraph |
| 1 1 | 0.73525 | 59.040 | C Epigraph |
| 2 2 | 0.84494 | 204.578 | C Epigraph |
| 2 2 | 0.84494 | 204.578 | C Tailored |
| 2 3 | 0.86153 | 205.387 | C Tailored |
| 3 3 | 0.88154 | 338.417 | C Tailored |
| 2 4 | 0.87000 | 188.307 | C Tailored |
| 3 4 | 0.89175 | 290.854 | C Tailored |
| 2 5 | 0.87699 | 187.849 | C Tailored |
| 3 5 | 0.89945 | 295.930 | C Tailored |
| 2 6 | 0.87996 | 191.538 | C Tailored |
| 3 6 | 0.90373 | 290.985 | C Tailored |

[0209] Epitope Coverage of USA B Clade Gag

| | | | Vaccine evaluated |
|---|---|---|---|
| n m | Coverage | Extras | against data set |
| 1 1 | 0.55488 | 237.815 | M Epigraph |
| 2 2 | 0.67323 | 629.333 | M Epigraph |
| 1 1 | 0.61174 | 195.720 | B Epigraph |
| 2 2 | 0.72471 | 553.899 | B Epigraph |
| 2 3 | 0.73615 | 557.254 | B Tailored |
| 3 3 | 0.75734 | 786.772 | B Tailored |
| 2 4 | 0.74354 | 547.725 | B Tailored |
| 3 4 | 0.76973 | 762.524 | B Tailored |
| 2 5 | 0.74786 | 546.111 | B Tailored |
| 3 5 | 0.77777 | 779.487 | B Tailored |
| 2 6 | 0.75226 | 536.619 | B Tailored |
| 3 6 | 0.78669 | 773.000 | B Tailored |

[0210] Epitope Coverage of USA B Clade p24

| | | | Vaccine evaluated |
|---|---|---|---|
| n m | Coverage | Extras | against data set |
| 1 1 | 0.73131 | 59.979 | M EpiGraph |
| 2 2 | 0.84204 | 214.296 | M EpiGraph |
| 1 1 | 0.76421 | 52.646 | B EpiGraph |
| 2 2 | 0.87373 | 201.233 | B EpiGraph |
| 2 3 | 0.88878 | 194.434 | B Tailored |
| 3 3 | 0.90810 | 297.571 | B Tailored |
| 2 4 | 0.89779 | 190.635 | B Tailored |
| 3 4 | 0.91754 | 282.386 | B Tailored |
| 2 5 | 0.90461 | 191.794 | B Tailored |
| 3 5 | 0.92704 | 285.005 | B Tailored |
| 2 6 | 0.90859 | 187.889 | B Tailored |
| 3 6 | 0.93556 | 280.704 | B Tailored |

### Example 10: Vaccine Testing

[0211] The vaccine arms for initial testing in CMV include: 1) A single population episensus Gag antigen, central to the U.S. B clade epidemic; 2) The population episensus plus a tailored Gag protein selected to be a best match natural HIV-1 strain; 3) The population episensus plus a tailored Gag protein selected to be a best match different (and distant) natural HIV-1 strain; 4) The population episensus plus both Gag proteins from cohort 2 and 3. The resulting immune responses are analyzed using overlapping 15-mer peptides (4 amino acid overlap) corresponding to the vaccine antigen (to determine the total vaccine-elicited Gag-specific responses) and then to both the “target” HIV-1 strain and selected non-target HIV strains (see below) to measure the strain-specific responses and the level of epitope matching (comparing target vs. non-target HIV Gag sequences). It is determined whether computationally designed inserts and vector combinations provide higher magnitude and broader T cell responses to the target strain, while minimizing non-target strain matched responses. The results of this analysis allow for experimentally testing the predictions for epitope matching generated in Example 1.

[0212] Four cohorts of 5 Rhesus Macaques (RM) are inoculated with 10⁶ PFU of HCMV vectors as follows: cohort 1 receives a single vector containing the clade B episensus sequence, cohort 2 receives the episensus vector plus a single tailored vaccine vector, cohort 3 receives the episensus plus a different tailored vaccine vector and cohort 4 receives the episensus plus both tailored vaccine vectors. The vaccines are “tailored” towards 2 representative transmitted/founder HIV strains selected from a small set of 9 B clade U.S. HIV infections that were extensively sequenced longitudinally; this panel represents a spectrum of natural infection comparable to what might be encountered in a human clinical trial. In essence, these 2 divergent natural strains are being used as prototype patients. The episensus/tailored vaccine insert pair that is optimized for one will be suboptimal for the other and vice versa, allowing—via determination of cross-recognition to peptide sets reflecting each strain's specific sequence—reciprocal analysis of whether there is a benefit to our tailored sequence matching strategy. In addition to this reciprocal analysis, the sequence from the other 7 infections will vary in their relative “match” to the selected vaccine vector insert(s), and by analyzing the responses to peptide sets reflecting the sequences of these other 7 HIV strains, the relationship between vector insert sequence and vector combination on magnitude and breadth of matched vs. unmatched responses will be comprehensively analyzed. Part of the motivation for focusing on this set of 9 strains is that carefully sequenced full length genomes are available from longitudinal samples. The isolates are also available as infectious molecular clones, which may be useful for assessing responses in subsequent human studies. Thus by doing the groundwork in RM using this set, there will be a particularly useful matched set of proteins for direct comparisons between macaque and human responses when these vaccines are advanced into human studies.

[0213] Rhesus monkeys (RM) are inoculated subcutaneously at day 0 and week 12 and followed longitudinally for one year. Since vaccination by HCMV-vectors is not affected by pre-existing anti-RhCMV immunity, animals naturally infected with RhCMV are used for these experiments. Flow cytometric intracellular cytokine analysis (ICS) is used to determine the CD4+ and CD8+ T cell response to individual consecutive 15mer peptides comprising the vaccine sequences within the vaccine inserts administered to each animal (which will comprise the total vaccine-elicited responses). It is then determined whether these epitope-specific T cells recognize epitope variants in both the target strain and the other 8 non-target strains. For peptides that show responses to strain-specific epitopes, the magnitude, functional avidity, and functional characteristics (IFN-γ, TNF-α, IL-2 and MIP-1β production and CD107 externalization) of these responses to the “parent” (vaccine insert sequences) peptide variants are compared to determine the degree of functional cross-reactivity. In selected cases, truncation analysis is used to identify the core epitope for similar comparative analysis. To determine the percentage of MHC-II restricted CD8+ T cells present, “blocking” mAbs specific for MHC-I and MHC-II, and the invariant chain-derived, MHC-II-specific binding peptide CLIP is used to inhibit influenza-specific CD8+ T cell responses in PBMC, as has been done previously for SIV responses.

[0214] Regardless of the T cell priming results related to vector-specific genes, the immunological analysis allows for testing the hypothesis that T cells induced by tailored vaccines are superior with respect to epitope coverage of a given natural HIV reservoir compared to non-tailored vaccines. The tailored 2 antigen cocktail could likely generate T cell responses with at least 25% higher frequency of cross-reactive responses to its matched natural strain compared to episensus alone (Table 5). Testing is also done to determine whether inclusion of 3 complementary tailored antigens in a cocktail induces more cross-reactivity, or if antigen dilution or the presence of greater numbers of vaccine-specific epitopes necessitated by adding 3 instead of 2 antigens actually diminishes the magnitude or breadth of the cross reactive response to the natural protein. CMV-based T cell responses are expected to be much broader and therefore cover a much higher percentage of sequences than reported previously for other vectors. Thus, even with a relatively small number of animals there should be sufficient epitope responses to evaluate the impact of sequence variation on the cross-reactive potential of the responses. The number and magnitude of all responses to the vaccines is determined by using vaccine-matched sets of peptides. Once the targeted peptides are determined, using just those peptides that are positive in each animal, the impact of natural variation on each vaccine-responsive peptide is determined. The natural variants that are tested are based on the variation found in a reference panel, including both tailored and poorly matched Gags. Nonparametric and computational re-sampling statistical methods are used as the primary tools to evaluate the impact of epitope variation on diminishing magnitude or abrogation of recognition. These analyses are complemented, however, by using generalized linear models as needed to explore the impact of more complex interactions on T cell response cross-reactivity.

```
SEQ ID NO: 691
Tailored vaccine antigen episensus sequence.
            MGARASVLSGGELDRWEKIRLRPGGKKKYKLKHIVWASRELERFAVNPGLLETSEGCRQILGQLQPSLQTGS
EELKSLYNTVATLYCVHQKIEVKDTKEALDKIEEEQNKSKKKAQQ-------AAADTGNSS---------
QVSQNYPIVQNLQGQMVHQAISPRTLNAWVKVVEEKAFSPEVIPMFSALSEGATPQDLNTMLNTVGGHQAAMQMLKET
INEEAAEWDRLHPVHAGPIAPGQMREPRGSDIAGTTSTLQEQIGWMTNNPPIPVGEIYKRWIILGLNKIVRMYSPTSI
LDIRQGPKEPFRDYVDRFYKTLRAEQASQEVKNWMTETLLVQNANPDCKTILKALGPAATLEEMMTACQGVGGPGHKA
RVLAEAMSQVTN--SATIMMQRGNFRNQRKTVKCFNCGKEGHIARNCRAPRKKGCWKCGKEGHQMKDC--
TERQANFLGKIWPSH-KGRPGNFLQ--------SRPEPT--------APPEESFRFGEETTTPS-------------
QKQEPIDKE-----LYP-LASLRSLFGNDPSSQ
SEQ ID NO: 692
Tailored vaccine antigen 1 sequence.
            MGARASVLSGGELDKWEKIRLRPGGKKKYRLKHIVWASRELERFAVNPGLLETSGGCRQILEQLQPSLQTGS
EELRSLYNTVATLYCVHQKIDVKDTKEALEKIEEEQNKSKKKAQQ-----AAAAADTGNNS---------
QVSQNYPIVQNMQGQMVHQALSPRTLNAWVKVIEEKAFSPEVIPMFTALSEGATPQDLNTMLNSVGGHQAAMQMLKET
INEEAAEWDRVHPVHAGPVAPGQMREPRGSDIAGTTSTLQEQIGWMTSNPPIPVGEIYKRWIIMGLNKIVRMYSPTSI
LDIKQGPKEPFRDYVDRFYKTLRAEQATQEVKNWMTETLLVQNSNPDCKTILKALGPGATLEEMMTACQGVGGPSHKA
RVLAEAMSQATN--SATIMMQKGNFRNQRKIVKCFNCGKEGHIAKNCRAPRKKGCWKCGREGHQMKDC--
TERQVNFLGKIWPSH-KGRPGNFLQ--------NRPEPT-----------APPAESFRFGEETTTPP----------
QKQEPIDKE-----LYP-LASLKSLFGNDPSSQ
SEQ ID NO: 693
Tailored vaccine antigen 2 sequence.
            MGARASVLSGGKLDKWEKIRLRPGGKKRYKLKHIVWASRELERFAVNPGLLETAEGCRQILGQLQPALQTGS
EELKSLFNTVATLYCVHQRIDVKDTKEALEKIEEEQNKSKKKAQP------AAADTGSSS----------
QVSQNYPIVQNMQGQMVHQAISPRTLNAWVKVIEEKAFSPEVIPMFAALSEGATPQDLNLMLNTVGGHQAAMQMLKET
INEEAAEWDRLHPVHAGPVAPGQMREPRGSDIAGTTSTLQEQIGWMTHNPPIPVGEIYKKWIIMGLNKIVRMYSPTSI
LDIKQGPKEPFRDYVDRFYKTLRAEQATQEVKNWMTETLLVQNSNPDCKTILKALGPGATLEEMMTACQGVGGPSHKA
RVLAEAMSQATN--SATIMMQRGNFKNQRKTIKCFNCGKEGHIAKNCRAPRKKGCWKCGREGHQMKDC--
TERQANFLGKIWPSH-KGRPGNFLQ--------NRPEPT-----------APPAESFRFGEETTTPP----------
QKQEPIDKE-----LYP-LASLKSLFGNDPSSQ
SEQ ID NO: 694
Tailored vaccine antigen 3 sequence.
            MGARASVLSGGELDKWEKIRLRPGGKKKYRLKHIVWASRELERFAVNPGLLETAEGCRQILEQLQPSLQTGS
EELRSLYNTVAVLYCVHQRIDVKDTKEALDKIEEEQNKSKKKAQQ-----AAAAADTGNNS---------
QVSQNYPIVQNLQGQMVHQPISPRTLNAWVKVIEEKAFSPEVIPMFTALSEGATPQDLNTMLNTVGGHQAAMQMLKDT
INEEAAEWDRLHPVQAGPIAPGQIREPRGSDIAGTTSTLQEQIAWMTNNPPIPVGDIYKRWIILGLNKIVRMYSPTSI
LDIKQGPKEPFRDYVDRFYKTLRAEQASQDVKNWMTETLLVQNSNPDCKTILKALGPGATLEEMMTACQGVGGPSHKA
RVLAEAMSQATN--SATIMMQKGNFRNQRKIVKCFNCGKEGHIAKNCRAPRKKGCWKCGREGHQMKDC--
TERQANFLGKIWPSS-KGRPGNFLQ--------SRPEPT-----------APPAESFRFGEETTTPP----------
QKQEPIDKE-----LYP-LASLKSLFGNDPSSQ
SEQ ID NO: 695
Tailored vaccine antigen 4 sequence.
            MGARASVLSGGKLDKWEKIRLRPGGKKKYRLKHIVWASRELERFAVNPGLLETAEGCRQILGQLQPALQTGS
EELRSLYNTVATLYCVHQRIEVKDTKEALEKIEEEQNKSKKKVQQ------AAAADTGNSN---------
QVSQNYPIVQNIQGQMVHQPLSPRTLNAWVKVIEEKAFSPEVIPMFTALSEGATPQDLNTMLNTIGGHQAAMQMLKET
INEEAADWDRLHPVHAGPVAPGQMREPRGSDIAGTTSNLQEQIGWMTSNPPIPVGEIYKRWIIMGLNKIVRMYSPTSI
LDIKQGPKEPFRDYVDRFYKTLRAEQASQDVKNWMTETLLVQNSNPDCKTILKALGPGATLEEMMTACQGVGGPSHKA
RVLAEAMSQVTN--SATIMMQKGNFRNQRKIVKCFNCGKEGHIAKNCRAPRKRGCWKCGKEGHQMKEC--
TERQANFLGKIWPSY-KGRPGNFLQ--------SRPEPS-----------APPEESFRFGEETATPS----------
QKQEPIDKE-----LYP-LASLKSLFGNDPSSQ
SEQ ID NO: 696
Tailored vaccine antigen 5 sequence.
            MGARASVLSGGKLDKWEKIRLRPGGKKQYKLKHLVWASRELERFAVNPGLLETAEGCRQILGQLQPALQTGS
EELKSLFNTVATLYCVHQRIDVKDTKEALEKIEEEQNKSKKKAQQ-------AAADTGNNS---------
QVSQNYPIVQNIQGQMVHQALSPRTLNAWVKVIEEKAFSPEVIPMFSALAEGATPQDLNTMLNTVGGHQAAMQILKET
INEEAAEWDRLHPVQAGPVAPGQMREPRGSDIAGTTSNLQEQIAWMTHNPPIPVGETYKRWIIMGLNKIVRMYSPVSI
LDIRQGPKEPFRDYVDRFYKTLRAEQASQDVKNWMTETLLVQNSNPDCKTILKALGPGATLEEMMTACQGVGGPSHKA
RVLAEAMSQATN--PATIMMQRGNFKNQRKIVKCFNCGKEGHIAKNCRAPRKKGCWKCGKEGHQMKEC--
TERQANFLGKIWPSY-KGRPGNFLQ--------SRPEPS-----------APPEESFRFGEETTTPP----------
QKQEPIDKE-----LYP-LTSLRSLFGNDPSSQ
SEQ ID NO: 697
EpiGraph antigen 1 sequence.
            MGARASVLSGGELDRWEKIRLRPGGKKKYKLKHIVWASRELERFAVNPGLLETSEGCRQILGQLQPSLQTGS
EELKSLYNTVATLYCVHQRIDVKDTKEALDKIEEEQNKSKKKAQQ-------AAADTGNSS---------
QVSQNYPIVQNLQGQMVHQAISPRTLNAWVKVVEEKAFSPEVIPMFSALSEGATPQDLNTMLNTVGGHQAAMQMLKET
INEEAAEWDRLHPVHAGPIAPGQMREPRGSDIAGTTSTLQEQIGWMTNNPPIPVGETYKRWIILGLNKIVRMYSPTSI
LDIRQGPKEPFRDYVDRFYKTLRAEQASQEVKNWMTETLLVQNANPDCKTILKALGPAATLEEMMTACQGVGGPGHKA
RVLAEAMSQVTN--SATIMMQRGNFRNQRKTVKCFNCGKEGHIARNCRAPRKKGCWKCGKEGHQMKDC--
TERQANFLGKIWPSH-KGRPGNFLQ--------SRPEPT-----------APPEESFRFGEETTTPS----------
QKQEPIDKE-----LYP-LASLRSLFGNDPSSQ
SEQ ID NO: 698
Epigraph cocktail antigen 1.
            MGARASVLSGGELDRWEKIRLRPGGKKKYKLKHIVWASRELERFAVNPGLLETSEGCRQILGQLQPSLQTGS
EELKSLYNTVATLYCVHQRIDVKDTKEALDKIEEEQNKSKKKAQQ-------AAADTGNSS---------
QVSQNYPIVQNLQGQMVHQAISPRTLNAWVKVVEEKAFSPEVIPMFSALSEGATPQDLNTMLNTVGGHQAAMQMLKET
INEEAAEWDRLHPVHAGPIAPGQMREPRGSDIAGTTSTLQEQIGWMTNNPPIPVGETYKRWIILGLNKIVRMYSPTSI
LDIRQGPKEPFRDYVDRFYKTLRAEQASQEVKNWMTETLLVQNANPDCKTILKALGPAATLEEMMTACQGVGGPGHKA
RVLAEAMSQVTN--SATIMMQRGNFRNQRKTVKCFNCGKEGHIARNCRAPRKKGCWKCGKEGHQMKDC--
TERQANFLGKIWPSH-KGRPGNFLQ--------SRPEPT-----------APPEESFRFGEETTTPS----------
QKQEPIDKE-----LYP-LASLRSLFGNDPSSQ
SEQ ID NO: 699
Epigraph cocktail antigen 2.
            MGARASVLSGGKLDKWEKIRLRPGGKKKYRLKHIVWASRELERFALNPGLLETAEGCRQILGQLQPALQTGS
EELKSLFNTVATLYCVHQKIDVKDTKEALEKIEEEQNKSKKKAQQ-----AAAAADTGNNS---------
QVSQNYPIVQNMQGQMVHQALSPRTLNAWVKVIEEKAFSPEVIPMFTALSEGATPQDLNLMLNTVGGHQAAMQILKET
INEEAADWDRLHPVHAGPVAPGQMREPRGSDIAGTTSNLQEQIGWMTSNPPIPVGETYKRWIIMGLNKIVRMYSPVSI
LDIKQGPKEPFRDYVDRVYKTLRAEQASQDVKNWMTETLLVQNSNPDCKTILKALGPGATLEEMMTACQGVGGPSHKA
RVLAEAMSQATN--SATIMMQKGNFRNQRKIVKCFNCGKEGHIAKNCRAPRKRGCWKCGKEGHQMKEC--
TERQANFLGKIWPSY-KGRPGNFLQ--------NRPEPT-----------APPAESFRFGEETTTPP----------
QKQEPIDKE-----LYP-LASLKSLFGNDPSSQ
SEQ ID NO: 700
Epigraph cocktail antigen 3.
            ARASVLSGGELDKWEKIRLRPGGKKQYKLKHLVWASRELERFAINPGLLETSGGCRQILEQLQPSLQTGSEE
LRSLYNTVAVLYCVHQRIEVKDTKEALEKVEEEQNKSKKKVQQ-------AAADTGNSN---------
QVSQNYPIVQNIQGQMVHQPISPRTLNAWVKVIEDKAFSPEVIPMFAALSEGATPQDLNTMLNTIGGHQAAMQMLKDT
INEEAAEWDRLHPVQAGPVAPGQMRDPRGSDIAGTTSTLQEQIAWMTNNPPIPVGDIYKRWIILGLNKIVRMYSPTSI
LDIKQGPKESFRDYVDRFYKTLRAEQATQEVKNWMTETLLVQNANPDCRTILKALGPAATLEEMMSACQGVGGPSHKA
RILAEAMSQVTN--
STAIMMQRGNFKNQRKTVKCFNCGREGHIAKNCRAPRKKGCWKCGREGHQMKDCTERQRQANFLGKIWPSS-
KGRPGNFLQ--------SRPEPS-----------APPEESFRFGEETATPS----------QKQEPIDKE-----
LYP-LTSLRSLFGNDPSLQ
SEQ ID NO: 701
HIV B gag/nef fusion Epigraph 1
            MGARASVLSGGELDRWEKIRLRPGGKKKYRLKHIVWASRELERFAVNPGLLETSEGCRQILGQLQPSLQTGS
EELKSLYNTVATLYCVHQRIEVKDTKEALDKIEEEQNKSKKKAQQAAADTGNSSQVSQNYPIVQNLQGQMVHQAISPR
TLNAWVKVVEEKAFSPEVIPMFSALSEGATPQDLNTMLNTVGGHQAAMQMLKETINEEAAEWDRLHPVHAGPIAPGQM
REPRGSDIAGTTSTLQEQIGWMTNNPPIPVGEIYKRWIILGLNKIVRMYSPTSILDIRQGPKEPFRDYVDRFYKTLRA
EQASQEVKNWMTETLLVQNANPDCKTILKALGPAATLEEMMTACQGVGGPGHKARVLAEAMSQVTNSATIMMQRGNFR
NQRKTVKCFNCGKEGHIAKNCRAPRKKGCWKCGKEGHQMKDCTERQANFLGKIWPSHKGRPGNFLQSRPEPTAPPEES
FRFGEETTTPSQKQEPIDKELYPLASLKSLFGNDPSSQGGKWSKSSIVGWPAVRERMRRAEPAAEGVGAVSRDLEKHG
AITSSNTAATNADCAWLEAQEEEEVGFPVRPQVPLRPMTYKGALDLSHFLKEKGGLEGLIYSQKRQDILDLWVYHTQG
YFPDWQNYTPGPGIRYPLTFGWCFKLVPVEPEKVEEANEGENNSLLHPMSQHGMDDPEKEVLMWKFDSRLAFHHMARE
LHPEYYKDC
SEQ ID NO: 702
HIV B gag/nef fusion Epigraph 2
            MGARASVLSGGKLDKWEKIRLRPGGKKKYKLKHIVWASRELERFALNPGLLETSEGCKQILGQLQPALQTGS
EELRSLYNTVAVLYCVHQRIDVKDTKEALEKIEEEQNKCKKKAQQAAAAADTGNNSQVSQNYPIVQNMQGQMVHQALS
PRTLNAWVKVIEEKAFSPEVIPMFTALSEGATPQDLNTMLNTIGGHQAAMQMLKDTINEEAAEWDRVHPVHAGPVAPG
QMREPRGSDIAGTTSNLQEQIAWMTHNPPIPVGEIYKRWIIMGLNKIVRMYSPVSILDIKQGPKEPFRDYVDRFYRTL
RAEQASQDVKNWMTETLLVQNSNPDCKTILKALGPGATLEEMMTACQGVGGPSHKARVLAEAMSQVTNSATIMMQKGN
FRNQRKIVKCFNCGKEGHIARNCRAPRKRGCWKCGKEGHQMKECTERQANFLGKIWPSYKGRPGNFLQNRPEPTAPPA
ESFRFGEETATPPQKQEPIDKEMYPLASLRSLFGNDPSQGGKWSKRSVPGWNTIRERMRRTEPAAEGVGAASRDLERH
GAITSSNTAANNAACAWLEAQEDEEVGFPVKPQVPLRPMTYKAAVDLSHFLKEKGGLEGLIHSQKRQEILDLWVYNTQ
GYFPDWHNYTPGPGTRFPLTFGWCFKLVPVDPEQVEKANEGENNCLLHPMSLHGMDDPEREVLVWKFDSRLAFHHVAR
EKHPEYYKDC
SEQ ID NO: 703
HIV B pol Epigraph 1
            MFFRENLAFPQGKAREFSSEQTRANSPTRRELQVWGRDNNSLSEAGADRQGTVSFSFPQITLWQRPLVTIKI
GGQLKEALLADDTVLEEMNLPGRWKPKMIGGIGGFIKVRQYDQIPIEICGHKAIGTVLVGPTPVNIIGRNLLTQIGCT
LNFPISPIETVPVKLKPGMDGPKVKQWPLTEEKIKALVEICTEMEKEGKISKIGPENPYNTPVFAIKKKDSTKWRKLV
DFRELNKRTQDFWEVQLGIPHPAGLKKKKSVTVLDVGDAYFSVPLDKDFRKYTAFTIPSINNETPGIRYQYNVLPQGW
KGSPAIFQSSMTKILEPFRKQNPDIVIYQLYVGSDLEIGQHRTKIEELRQHLLRWGFTTPDKKHQKEPPFLWMGYELH
PDKWTVQPIVLPEKDSWTVNDIQKLVGKLNWASQIYAGIKVKQLCKLLRGTKALTEVVPLTEEAELELAENREILKEP
VHGVYYDPSKDLIAEIQKQGQGQWTYQIYQEPFKNLKTGKYARMRGAHTNDVKQLTEAVQKIATESIVIWGKTPKFKL
PIQKETWEAWWTEYWQATWIPEWEFVNTPPLVKLWYQLEKEPIVGAETFYVDGAANRETKLGKAGYVTDRGRQKVVSL
TDTTNQKTQAIHLALQDSGLEVNIVTDSQYALGIIQAQPDKSESELVSQIIEQLIKKEKVYLAWVPAHKGIGGNEQVD
KLVSAGIRKVLFLDGIDKAQEEHEKYHSNWRAMASDFNLPPVVAKEIVASCDKCQLKGEAMHGQVDCSPGIWQLCTHL
EGKIILVAVHVASGYIEAEVIPAETGQETAYFLLKLAGRWPVKTIHTNGSNFTSTTVKAACWWAGIKQEFGIPYNPQS
QGVVSMNKELKKIIGQVRDQAEHLKTAVQMAVFIHNFKRKGGIGGYSAGERIVDIIATDIQTKELQKQITKIQNFRVY
YRDSRDPLWKGPAKLLWKGEGAVVIQDNSDIKVVPRRKAKIIRDYGKQMAGDDCVASRQDED
SEQ ID NO: 704
HIV B pol Epigraph 2
            MFFREDLAFPQGEAREFPSEQTRANSPTSRELQVWGGDNNSPSEAGADRQGTVSLSFPQITLWQRPLVTVKI
GGQLKEALLADDTVLEEMSLPGKWKPKMIGGIGGFIKVRQYDQVPIEICGHKTIGTVLIGPTPVNIIGRNLLTQLGCT
LNFPISPIETVPVKLKPGMDGPRVKQWPLTEEKIKALIEICTEMEKEGKISRIGPENPYNTPIFAIKKKDSTKWRKLV
DFRELNKKTQDFWEVQLGIPHPSGLKKKKSVTVLDVGDAYFSVPLDKEFRKYTAFTIPSTNNETPGIRYQYNVLPQGW
KGSPAIFQCSMTKILEPFRKQNPEIVIYQLYVGSDLEIGQHRAKIEELRQHLLKWGFTTPDKKHQKEPPFLWMGYELH
PDKWTVQPIELPEKDSWTVNDIQKLVGKLNWASQIYPGIKVRQLCKLLRGAKALTEVIPLTKEAELELAENREILREP
VHGVYYDPTKDLIAEIQKQGLGQWTYQIYQEPFKNLKTGKYARTRGAHTNDVRQLTEAVQKITTESIVIWGKTPKFRL
PIQKETWETWWTEYWQATWIPEWEFVNTPPLVKLWYQLEKEPIIGAETFYVDGASNRETKLGKAGYVTNRGRQKVISL
TDTTNQKTLQAIYLALQDSGSEVNIVTDSQYALGIIQAQPDQSESELVNQIIEQLINKEKVYLAWVPAHKGIGGNEQV
DKLVSTGIRKVLFLDGIDRAQEEHEKYHNNWRAMASDFNLPPIVAKEIVASCDKCQLKGEAIHGQVDCSPGIWQLCTH
LEGKVILVAVHVASGYIEAEVIPAETGQETAYFILKLAGRWPVKTVHTNGSNFTSATVKAACWWAGVKQEFGIPYNPQ
SQGVVSMNNELKKIIGQIRDQAEHLKTAVQMAVFIHNFKRKGGIGEYSAGERIIDIIATDIQTRELQKQITKIQNFRV
YYRDNRDPLWKGPAKLLWKGEGAVVIQDNSEIKVVPRRKVKIIRDYGKQMAGDDCVAGRQDED
SEQ ID NO: 705
HIV M gag/nef fusion Epigraph 1
            MGARASVLSGGKLDAWEKIRLRPGGKKKYRLKHLVWASRELERFALNPGLLETSEGCRQILGQLQPSLQTGS
EELKSLYNTVATLYCVHQRIEVKDTKEALDKIEEEQNKSKKKAQQAAADTGNSSQVSQNYPIVQNLQGQMVHQAISPR
TLNAWVKVVEEKAFSPEVIPMFSALSEGATPQDLNTMLNTVGGHQAAMQMLKETINEEAAEWDRLHPVHAGPIAPGQM
REPRGSDIAGTTSTLQEQIGWMTNNPPIPVGEIYKRWIILGLNKIVRMYSPVSILDIRQGPKEPFRDYVDRFYKTLRA
EQATQEVKNWMTETLLVQNANPDCKTILKALGPAATLEEMMTACQGVGGPGHKARVLAEAMSQVTNSATIMMQRGNFK
GQKRIKCFNCGKEGHIARNCRAPRKKGCWKCGKEGHQMKDCTERQANFLGKIWPSHKGRPGNFLQSRPEPTAPPEESF
RFGEETTTPSQKQEPIDKELYPLASLKSLFGNDPLSQGGKWSKSSIVGWPAVRERMRRAEPAAEGVGAVSRDLEKHGA
ITSSNTAATNADCAWLEAQEEEEVGFPVRPQVPLRPMTYKGALDLSHFLKEKGGLEGLIYSKKRQEILDLWVYHTQGY
FPDWQNYTPGPGIRYPLTFGWCFKLVPVDPREVEEANEGENNCLLHPMSQHGMDDPEKEVLMWKFDSRLAFHHMAREL
HPEYYKDC
SEQ ID NO: 706
HIV M gag/nef conserved Epigraph 1
            MPIVQNLQGQMVHQAISPRTLNAWVKVVEEKAFSPEVIPMFSALSEGATPQDLNTMLNTVGGHQAAMQMLKE
TINEEAAEWDRLHPVHAGPIAPGQMREPRGSDIAGTTSTLQEQIGWMTNNPPIPVGEIYKRWIILGLNKIVRMYSPVS
ILDIRQGPKEPFRDYVDRFYKTLRAEQATQEVKNWMTETLLVQNANPDCKTILKALGPAATLEEMMTACQGVGGPGHK
ARVLVGFPVRPQVPLRPMTYKGALDLSHFLKEKGGLEGLIYSKKRQEILDLWVYHTQGYFPDWQNYTPGPGIRYPLTF
GWCFKLVP
SEQ ID NO: 707
HIV M gag/nef fusion Epigraph 2
            MGARASVLSGGELDRWEKIRLRPGGKKKYKLKHIVWASRELERFAVNPGLLETAEGCQQIIEQLQSTLKTGS
EELKSLFNTVAVLYCVHQRIDVKDTKEALEKIEEEQNKSQQKTQQAAAGTGSSSKVSQNYPIVQNAQGQMVHQPLSPR
TLNAWVKVIEEKAFSPEVIPMFTALSEGATPQDLNMMLNIVGGHQAAMQMLKDTINEEAAEWDRVHPVHAGPIPPGQM
REPRGSDIAGTTSNLQEQIGWMTSNPPIPVGDIYKRWIILGLNKIVRMYSPTSILDIKQGPKEPFRDYVDRFFKTLRA
EQASQEVKNWMTDTLLVQNANPDCKTILRALGPGATLEEMMTACQGVGGPSHKARVLAEAMSQVTNSATIMMQRGNFR
NQRKTVKCFNCGKEGHLARNCRAPRKKGCWKCGREGHQMKDCNERQANFLGKIWPSNKGRPGNFPQSRPEPTAPPAES
FRFEETTPAPKQEPKDREPLTSLKSLFGSDPLSQGSKWSKSSIVGWPAIRERMRRTEPAAEGVGAASRDLERHGAITS
SNTAANNADCAWLEAQEDEEVGFPVKPQVPLRPMTYKAAFDLSFFLKEKGGLDGLIYSQKRQDILDLWVYNTQGFFPD
WQNYTPGPGVRYPLTFGWCFKLVPVEPEKVEEANEGENNSLLHPMSLHGMDDPEREVLMWKFDSSLARRHMARELHPE
FYKDC
SEQ ID NO: 708
HIV M gag/nef conserved Epigraph 2
            MPIVQNAQGQMVHQPLSPRTLNAWVKVIEEKAFSPEVIPMFTALSEGATPQDLNMMLNIVGGHQAAMQMLKD
TINEEAAEWDRVHPVHAGPIPPGQMREPRGSDIAGTTSNLQEQIGWMTSNPPIPVGDIYKRWIILGLNKIVRMYSPTS
ILDIKQGPKEPFRDYVDRFFKTLRAEQASQEVKNWMTDTLLVQNANPDCKTILRALGPGATLEEMMTACQGVGGPSHK
ARVLVGFPVKPQVPLRPMTYKAAFDLSFFLKEKGGLDGLIYSQKRQDILDLWVYNTQGFFPDWQNYTPGPGVRYPLTF
GWCFKLVP
SEQ ID NO: 709
HIV M pol Epigraph 1
            MFFRENLAFPQGEAREFSSEQTRANSPTRRELQVWGRDNNSLSEAGADRQGTVSFSFPQITLWQRPLVTIKI
GGQLKEALLADDTVLEDINLPGKWKPKMIGGIGGFIKVRQYDQILIEICGKKAIGTVLVGPTPVNIIGRNLLTQIGCT
LNFPISPIETVPVKLKPGMDGPKVKQWPLTEEKIKALVEICTEMEKEGKISKIGPENPYNTPVFAIKKKDSTKWRKLV
DFRELNKRTQDFWEVQLGIPHPAGLKKKKSVTVLDVGDAYFSVPLDKDFRKYTAFTIPSINNETPGIRYQYNVLPQGW
KGSPAIFQSSMTKILEPFRKQNPDIVIYQLYVGSDLEIGQHRTKIEELRQHLLKWGFTTPDKKHQKEPPFLWMGYELH
PDKWTVQPIVLPEKDSWTVNDIQKLVGKLNWASQIYPGIKVKQLCKLLRGAKALTDIVPLTEEAELELAENREILKEP
VHGVYYDPSKDLIAEIQKQGQDQWTYQIYQEPFKNLKTGKYARMRGAHTNDVKQLTEAVQKIATESIVIWGKTPKFRL
PIQKETWETWWTEYWQATWIPEWEFVNTPPLVKLWYQLEKEPIVGAETFYVDGAANRETKLGKAGYVTDRGRQKVVSL
TETTNQKTLQAIHLALQDSGSEVNIVTDSQYALGIIQAQPDKSESELVNQIIEQLIKKEKVYLSWVPAHKGIGGNEQV
DKLVSSGIRKVLFLDGIDKAQEEHEKYHSNWRAMASDFNLPPIVAKEIVASCDKCQLKGEAMHGQVDCSPGIWQLCTH
LEGKVILVAVHVASGYIEAEVIPAETGQETAYFLLKLAGRWPVKVIHTNGSNFTSAAVKAACWWAGIKQEFGIPYNPQ
SQGVVSMNKELKKIIGQVRDQAEHLKTAVQMAVFIHNFKRKGGIGGYSAGERIIDIIATDIQTKELQKQITKIQNFRV
YYRDSRDPIWKGPAKLLWKGEGAVVIQDNSDIKVVPRRKAKIIRDYGKQMAGDDCVAGRQDEDQ
SEQ ID NO: 710
HIV M pol conserved Epigraph 1
            MPQITLWQRPLVTIKIGGQLKEALLADDTVLEDINLPGKWKPKMIGGIGGFIKVRQYDQILIEICGKKAIGT
VLVGPTPVNIIGRNLLTQIGCTLNFPISPIETVPVKLKPGMDGPKVKQWPLTEEKIKALVEICTEMEKEGKISKIGPE
NPYNTPVFAIKKKDSTKWRKLVDFRELNKRTQDFWEVQLGIPHPAGLKKKKSVTVLDVGDAYFSVPLDKDFRKYTAFT
IPSINNETPGIRYQYNVLPQGWKGSPAIFQSSMTKILEPFRKQNPDIVIYQLYVGSDLEIGQHRTKIEELRQHLLKWG
FTTPDKKHQKEPPFLWMGYELHPDKWTVQPIVLPEKDSWTVNDIQKLVGKLNWASQIYHGQVDCSPGIWQLCTHLEGK
VILVAVHVASGYIEAEVIPAETGQETAYFLLKLAGRWPVKVIHTNGSNFTSAAVKAACWWAGIKQEFGIPYNPQSQGV
VSMNKELKKIIGQVRDQAEHLKTAVQMAVFIHNFKRKGGIGGYSAGERIIDIIATDIQTKLQKQITKIQNFRVYYRDS
RDPIWKGPAKLLWKGEGAVVIQDNSDIKVVPRRKAKIIRDYGKQMAGDDCVAGRQDEDQ
SEQ ID NO: 711
HIV M pol Epigraph 2
            MFFREDLAFPQGKAREFPSEQTRANSPTRGELQVWGGDNNSPSEAGADRQGTVSFSFPQITLWQRPLVSIKV
GGQIKEALLADDTVLEEMNLPGRWKPKMIGGIGGFIKVRQYDQIPIEICGHKAIGTVLIGPTPVNIIGRNMLTQLGCT
LNFPISPIDTVPVTLKPGMDGPRVKQWPLTEEKIKALTEICKEMEKEGKITKIGPENPYNTPIFAIKKKDSTKWRKLV
DFRELNKKTQDFWEVQLGIPHPAGLKKKKSVTVLDVGDAYFSVPLDESFRKYTAFTIPSTNNETPGIRYQYNVLPQGW
KGSPAIFQCSMTKILEPFRIKNPEIVIYQLYVGSDLEIGQHRAKIEELREHLLRWGFTTPDKKHQKEPPFLWMGYELH
PDRWTVQPIELPEKDSWTVNDIQKLVGKLNWASQIYAGIKVRQLCKLLRGTKALTEVVPLTEEAELELAENREILKTP
VHGVYYDPSKDLVAEIQKQGQGQWTYQIYQEPYKNLKTGKYARKRSAHTNDVRQLTEVVQKIATESIVIWGKTPKFKL
PIQKETWEAWWTDYWQATWIPDWEFVNTPPLVKLWYQLEKDPIVGAETFYVDGAASRETKLGKAGYVTNRGRQKVVSL
TDTTNQKTLHAIHLALQDSGLEVNIVTDSQYALGIIQAQPDRSESEVVNQIIEELIKKEKVYLAWVPAHKGIGGNEQV
DKLVSAGIRKVLFLDGIDKAQEEHERYHSNWRTMASDFNLPPVVAKEIVANCDKCQLKGEAIHGQVDCSPGMWQLCTH
LEGKIILVAVHVASGYMEAEVIPAETGQETAYFILKLAGRWPVKTIHTNGSNFTSTTVKAACWWAGIQQEFGIPYNPQ
SQGVVSMNNELKKIIGQVREQAEHLKTAVQMAVFIHNFKRRGGIGGYSAGERIVDIIATDIQTRELQKQIIKIQNFRV
YYRDSRDPLWKGPAKLLWKGEGAVVIQDNSEIKVVPRRKVKIIKDYGKQMAGDDCVASRQDED
SEQ ID NO: 712
HIV M pol conserved Epigraph 2
            MPQITLWQRPLVSIKVGGQIKEALLADDTVLEEMNLPGRWKPKMIGGIGGFIKVRQYDQIPIEICGHKAIGT
VLIGPTPVNIIGRNMLTQLGCTLNFPISPIDTVPVTLKPGMDGPRVKQWPLTEEKIKALTEICKEMEKEGKITKIGPE
NPYNTPIFAIKKKDSTKWRKLVDFRELNKKTQDFWEVQLGIPHPAGLKKKKSVTVLDVGDAYFSVPLDESFRKYTAFT
IPSTNNETPGIRYQYNVLPQGWKGSPAIFQCSMTKILEPFRIKNPEIVIYQLYVGSDLEIGQHRAKIEELREHLLRWG
FTTPDKKHQKEPPFLWMGYELHPDRWTVQPIELPEKDSWTVNDIQKLVGKLNWASQIYHGQVDCSPGMWQLCTHLEGK
IILVAVHVASGYMEAEVIPAETGQETAYFILKLAGRWPVKTIHTNGSNFTSTTVKAACWWAGIQQEFGIPYNPQSQGV
VSMNNELKKIIGQVREQAEHLKTAVQMAVFIHNFKRRGGIGGYSAGERIVDIIATDIQTRLQKQIIKIQNFRVYYRDS
RDPLWKGPAKLLWKGEGAVVIQDNSEIKVVPRRKVKIIKDYGKQMAGDDCVASRQDED
SEQ ID NO: 713
SIV gag/nef hybrid
            MGARGSVLSGKKTDELEKVRLRPGGRKKYMLKHIVWAARELDRFGSAESLLESKEGCQRILAVLAPLMPTGS
EDLKSLFSTVCVVWCLHAEMKVKDTEEAKKTVQSHLVVESGTAETMPAQSRPTAPPSGRGGNYPVQQIGGNYVHLPLS
PRTLNAWVKLIEEKKFGAEVVPGFQALSEGCTPYDINQMLNCVGDHQAAMQIIRDIINEEAADWDLQHPQPAPQQGQL
REPSGSDIAGTTSSVDEQIQWMYRQQNPIPVGNIYRRWIQLGLQKCVRMYNPTNILDVKQGPKEPFQSYVDRFYKSLR
AEQTDAAVKNWMTQTLLIQNANPDCKLVLKGLGVNPTLEEMLTACQGVGGPGQKARLMAEALKDALTPGPIPFAAVQQ
RGQRKIIKCWNCGKTGHSARQCKAPRRKGCWKCGKAGHVMAKCPERQAGFLGFGPWGKKPHNFPMAQMPQGLTPTAPP
ADPAVDMLKNYMKMGKRQREKQRENRERPYKEVSEDLLHLSSLFGEDQPGGATSKRRSKPSGDLRQKLLRARGENYGR
LWGELEDGSSQSLGGLGKGLSSRSCEGQKYSQGQFMNTPWKNPAEEKEKLPYRKQNIDDVDEEDNDLVGVSVRPKVPL
RTMSYKLAIDMSHFIKEKGGLEGIYYSARRHRILDIYLEKEEGIIPDWQDYTSGPGIRYPKTFGWLWKLVPVDMSNEA
QEDDTHYLVHPAQTHQWSDPWGEVLVWKFDPLLAHTYEAFVRHPEEFGWKSGLPKEEVERRLAARGLLKMADKKETR
SEQ ID NO: 714
SIV gag/nef conserved
            MPVQQIGGNYVHLPLSPRTLNAWVKLIEEKKFGAEVVPGFQALSEGCTPYDINQMLNCVGDHQAAMQIIRDI
INEEAADWDLQHPQPAPQQGQLREPSGSDIAGTTSSVDEQIQWMYRQQNPIPVGNIYRRWIQLGLQKCVRMYNPTNIL
DVKQGPKEPFQSYVDRFYKSLRAEQTDAAVKNWMTQTLLIQNANPDCKLVLKGLGVNPTLEEMLTACQGVGGPGQKAR
LMVGVSVRPKVPLRTMSYKLAIDMSHFIKEKGGLEGIYYSARRHRILDIYLEKEEGIIPDWQDYTSGPGIRYPKTFGW
LWKLVP
SEQ ID NO: 715
SIV pol hybrid
            MFFRAWPMGKEASQFPHGPDASGADTNCSPRGSSCGSTEELHEVGQKAERKAEGEQRETLQGGNGGFAAPQF
SLWRRPVVTAHIEGQPVEVLLADDSIVTGIELGPHYTPKIVGGIGGFINTKEYKNVEIEVLGKRIKGTIMTGDTPINI
FGRNLLTALGMSLNFPIAKVEPVKVALKPGKDGPKLKQWPLSKEKIVALREICEKMEKDGQLEEAPPTNPYNTPTFAI
KKKDKNKWRMLIDFRELNRVTQDFTEVQLGIPHPAGLAKRKRITVLDIGDAYFSIPLDEEFRQYTAFTLPSVNNAEPG
KRYIYKVLPQGWKGSPAIFQYTMRHVLEPFRKANPDVTLVQILIASDRTDLEHDRVVLQSKELLNSIGFSTPEEKFQK
DPPFQWMGYELWPTKWKLQKIELPQRETWTVNDIQKLVGVLNWAAQIYPGIKTKNLCKMIRGKMALTEGVQWTELAEA
ELEENRIILNQEQEGRYYREDKPLEATVLKNQDNQWTYKIHQGDRILKVGKYAKVKNTHTNGIRLLANVVQKIGKESI
VIWGQTPFFHLPVEREVWDQWWTDYWQATWIPDWDFVSTPPLIRLVFNLVKEPIEKEEVYYIDGSCNRNSKEGKAGYV
TDRGKEKVLVLEQATNQQALQAFLLALKDSGPKANIVTDSQYVLGIITGQPTESDSRIVAQIIEQMIKKSEVYIGWVP
AHKGLGGNQEVDRLVSQEIRQVLFLESIEPAQEDHDKYHSNIKELAFKFGLPRLVAKQIVDTCNKCQQKGEAIHGQAN
SDLGTWQMCTHLEGKIIIVAVHVASGFIEAEVIPQETGRQTALFLLKLAGRWPITHLHTNGANFASQEVKMVANWAGI
EHTFGVPYNPQSQGVVAMNHHLKNQIDRIREQANSVETIVLMAVHCMNFKRRGGIGDMTPAERLINMITTEQEIQFQQ
SKNSKFKNFRVYYREGRDQLWKGPGELLWKGEGAVILKVGTDIKVVPRRKAKIIKDYGGGKEVDSSSHMEDTGEAREV
A
SEQ ID NO: 716
SIV pol conserved
            MPQFSLWRRPVVTAHIEGQPVEVLLADDSIVTGIELGPHYTPKIVGGIGGFINTKEYKNVEIEVLGKRIKGT
IMTGDTPINIFGRNLLTALGMSLNFPIAKVEPVKVALKPGKDGPKLKQWPLSKEKIVALREICEKMEKDGQLEEAPPT
NPYNTPTFAIKKKDKNKWRMLIDFRELNRVTQDFTEVQLGIPHPAGLAKRKRITVLDIGDAYFSIPLDEEFRQYTAFT
LPSVNNAEPGKRYIYKVLPQGWKGSPAIFQYTMRHVLEPFRKANPDVTLVQILIASDRTDLEHDRVVLQSKELLNSIG
FSTPEEKFQKDPPFQWMGYELWPTKWKLQKIELPQRETWTVNDIQKLVGVLNWAAQIYHGQANSDLGTWQMCTHLEGK
IIIVAVHVASGFIEAEVIPQETGRQTALFLLKLAGRWPITHLHTNGANFASQEVKMVANWAGIEHTFGVPYNPQSQGV
VAMNHHLKNQIDRIREQANSVETIVLMAVHCMNFKRRGGIGDMTPAERLINMITTEQEIQFQQSKNSKFKNFRVYYRE
GRDQLWKGPGELLWKGEGAVILKVGTDIKVVPRRKAKIIKDYGGGKEVDSSSHMEDTGEAREVA
SEQ ID NO: 717
HIV B pol epigraph1
            FFRENLAFPQGKAREFSSEQTRANSPTRRELQVWGRDNNSLSEAGADRQGTVSFSFPQITLWQRPLVTIKIG
GQLKEALLDTGADDTVLEEMNLPGRWKPKMIGGIGGFIKVRQYDQIPIEICGHKAIGTVLVGPTPVNIIGRNLLTQIG
CTLNFPISPIETVPVKLKPGMDGPKVKQWPLTEEKIKALVEICTEMEKEGKISKIGPENPYNTPVFAIKKKDSTKWRK
LVDFRELNKRTQDFWEVQLGIPHPAGLKKKKSVTVLDVGDAYFSVPLDKDFRKYTAFTIPSINNETPGIRYQYNVLPQ
GWKGSPAIFQSSMTKILEPFRKQNPDIVIYQYMDDLYVGSDLEIGQHRTKIEELRQHLLRWGFTTPDKKHQKEPPFLW
MGYELHPDKWTVQPIVLPEKDSWTVNDIQKLVGKLNWASQIYAGIKVKQLCKLLRGTKALTEVVPLTEEAELELAENR
EILKEPVHGVYYDPSKDLIAEIQKQGQGQWTYQIYQEPFKNLKTGKYARMRGAHTNDVKQLTEAVQKIATESIVIWGK
TPKFKLPIQKETWEAWWTEYWQATWIPEWEFVNTPPLVKLWYQLEKEPIVGAETFYVDGAANRETKLGKAGYVTDRGR
QKVVSLTDTTNQKTELQAIHLALQDSGLEVNIVTDSQYALGIIQAQPDKSESELVSQIIEQLIKKEKVYLAWVPAHKG
IGGNEQVDKLVSAGIRKVLFLDGIDKAQEEHEKYHSNWRAMASDFNLPPVVAKEIVASCDKCQLKGEAMHGQVDCSPG
IWQLDCTHLEGKIILVAVHVASGYIEAEVIPAETGQETAYFLLKLAGRWPVKTIHTDNGSNFTSTTVKAACWWAGIKQ
EFGIPYNPQSQGVVESMNKELKKIIGQVRDQAEHLKTAVQMAVFIHNFKRKGGIGGYSAGERIVDIIATDIQTKELQK
QITKIQNFRVYYRDSRDPLWKGPAKLLWKGEGAVVIQDNSDIKVVPRRKAKIIRDYGKQMAGDDCVASRQDED
SEQ ID NO: 718
HIV M gag Epigraph1
            MGARASVLSGGKLDAWEKIRLRPGGKKKYRLKHLVWASRELERFALNPGLLETSEGCRQILGQLQPSLQTGS
EELKSLYNTVATLYCVHQRIEVKDTKEALDKIEEEQNKSKKKAQQAAADTGNSSQVSQNYPIVQNLQGQMVHQAISPR
TLNAWVKVVEEKAFSPEVIPMFSALSEGATPQDLNTMLNTVGGHQAAMQMLKETINEEAAEWDRLHPVHAGPIAPGQM
REPRGSDIAGTTSTLQEQIGWMTNNPPIPVGEIYKRWIILGLNKIVRMYSPVSILDIRQGPKEPFRDYVDRFYKTLRA
EQATQEVKNWMTETLLVQNANPDCKTILKALGPAATLEEMMTACQGVGGPGHKARVLAEAMSQVTNSATIMMQRGNFK
GQKRIKCFNCGKEGHIARNCRAPRKKGCWKCGKEGHQMKDCTERQANFLGKIWPSHKGRPGNFLQSRPEPTAPPEESF
RFGEETTTPSQKQEPIDKELYPLASLKSLFGNDPLSQ
SEQ ID NO: 719
HIV M gag Epigraph1 Conserved
            PIVQNLQGQMVHQAISPRTLNAWVKVVEEKAFSPEVIPMFSALSEGATPQDLNTMLNTVGGHQAAMQMLKET
INEEAAEWDRLHPVHAGPIAPGQMREPRGSDIAGTTSTLQEQIGWMTNNPPIPVGEIYKRWIILGLNKIVRMYSPVSI
LDIRQGPKEPFRDYVDRFYKTLRAEQATQEVKNWMTETLLVQNANPDCKTILKALGPAATLEEMMTACQGVGGPGHKA
RVL
SEQ ID NO: 720
HIV M gag Epigraph2
            MGARASVLSGGELDRWEKIRLRPGGKKKYKLKHIVWASRELERFAVNPGLLETAEGCQQIIEQLQSTLKTGS
EELKSLFNTVAVLYCVHQRIDVKDTKEALEKIEEEQNKSQQKTQQAAAGTGSSSKVSQNYPIVQNAQGQMVHQPLSPR
TLNAWVKVIEEKAFSPEVIPMFTALSEGATPQDLNMMLNIVGGHQAAMQMLKDTINEEAAEWDRVHPVHAGPIPPGQM
REPRGSDIAGTTSNLQEQIGWMTSNPPIPVGDIYKRWIILGLNKIVRMYSPTSILDIKQGPKEPFRDYVDRFFKTLRA
EQASQEVKNWMTDTLLVQNANPDCKTILRALGPGATLEEMMTACQGVGGPSHKARVLAEAMSQVTNSATIMMQRGNFR
NQRKTVKCFNCGKEGHLARNCRAPRKKGCWKCGREGHQMKDCNERQANFLGKIWPSNKGRPGNFPQSRPEPTAPPAES
FRFEETTPAPKQEPKDREPLTSLKSLFGSDPLSQ
SEQ ID NO: 721
HIV M gag Epigraph2 Conserved
            PIVQNAQGQMVHQPLSPRTLNAWVKVIEEKAFSPEVIPMFTALSEGATPQDLNMMLNIVGGHQAAMQMLKDT
INEEAAEWDRVHPVHAGPIPPGQMREPRGSDIAGTTSNLQEQIGWMTSNPPIPVGDIYKRWIILGLNKIVRMYSPTSI
LDIKQGPKEPFRDYVDRFFKTLRAEQASQEVKNWMTDTLLVQNANPDCKTILRALGPGATLEEMMTACQGVGGPSHKA
RVL
SEQ ID NO: 722
HIV M nef Epigraph1
            MGGKWSKSSIVGWPAVRERMRRAEPAAEGVGAVSRDLEKHGAITSSNTAATNADCAWLEAQEEEEVGFPVRP
QVPLRPMTYKGALDLSHFLKEKGGLEGLIYSKKRQEILDLWVYHTQGYFPDWQNYTPGPGIRYPLTFGWCFKLVPVDP
REVEEANEGENNCLLHPMSQHGMDDPEKEVLMWKFDSRLAFHHMARELHPEYYKDC
SEQ ID NO: 723
HIV M nef Epigraph1 Conserved
            VGFPVRPQVPLRPMTYKGALDLSHFLKEKGGLEGLIYSKKRQEILDLWVYHTQGYFPDWQNYTPGPGIRYPL
TFGWCFKLVP
SEQ ID NO: 724
HIV M nef Epigraph2
            MGSKWSKSSIVGWPAIRERMRRTEPAAEGVGAASRDLERHGAITSSNTAANNADCAWLEAQEDEEVGFPVKP
QVPLRPMTYKAAFDLSFFLKEKGGLDGLIYSQKRQDILDLWVYNTQGFFPDWQNYTPGPGVRYPLTFGWCFKLVPVEP
EKVEEANEGENNSLLHPMSLHGMDDPEREVLMWKFDSSLARRHMARELHPEFYKDC
SEQ ID NO: 725
HIV M nef Epigraph2 Conserved
            VGFPVKPQVPLRPMTYKAAFDLSFFLKEKGGLDGLIYSQKRQDILDLWVYNTQGFFPDWQNYTPGPGVRYPL
TFGWCFKLVP
SEQ ID NO: 726
HIV M pol Epigraph1
            FFRENLAFPQGEAREFSSEQTRANSPTRRELQVWGRDNNSLSEAGADRQGTVSFSFPQITLWQRPLVTIKIG
GQLKEALLDTGADDTVLEDINLPGKWKPKMIGGIGGFIKVRQYDQILIEICGKKAIGTVLVGPTPVNIIGRNLLTQIG
CTLNFPISPIETVPVKLKPGMDGPKVKQWPLTEEKIKALVEICTEMEKEGKISKIGPENPYNTPVFAIKKKDSTKWRK
LVDFRELNKRTQDFWEVQLGIPHPAGLKKKKSVTVLDVGDAYFSVPLDKDFRKYTAFTIPSINNETPGIRYQYNVLPQ
GWKGSPAIFQSSMTKILEPFRKQNPDIVIYQYMDDLYVGSDLEIGQHRTKIEELRQHLLKWGFTTPDKKHQKEPPFLW
MGYELHPDKWTVQPIVLPEKDSWTVNDIQKLVGKLNWASQIYPGIKVKQLCKLLRGAKALTDIVPLTEEAELELAENR
EILKEPVHGVYYDPSKDLIAEIQKQGQDQWTYQIYQEPFKNLKTGKYARMRGAHTNDVKQLTEAVQKIATESIVIWGK
TPKFRLPIQKETWETWWTEYWQATWIPEWEFVNTPPLVKLWYQLEKEPIVGAETFYVDGAANRETKLGKAGYVTDRGR
QKVVSLTETTNQKTELQAIHLALQDSGSEVNIVTDSQYALGIIQAQPDKSESELVNQIIEQLIKKEKVYLSWVPAHKG
IGGNEQVDKLVSSGIRKVLFLDGIDKAQEEHEKYHSNWRAMASDFNLPPIVAKEIVASCDKCQLKGEAMHGQVDCSPG
IWQLDCTHLEGKVILVAVHVASGYIEAEVIPAETGQETAYFLLKLAGRWPVKVIHTDNGSNFTSAAVKAACWWAGIKQ
EFGIPYNPQSQGVVESMNKELKKIIGQVRDQAEHLKTAVQMAVFIHNFKRKGGIGGYSAGERIIDIIATDIQTKELQK
QITKIQNFRVYYRDSRDPIWKGPAKLLWKGEGAVVIQDNSDIKVVPRRKAKIIRDYGKQMAGDDCVAGRQDEDQ
SEQ ID NO: 727
HIV M pol Epigraph1 Conserved
            PQITLWQRPLVTIKIGGQLKEALLDTGADDTVLEDINLPGKWKPKMIGGIGGFIKVRQYDQILIEICGKKAI
GTVLVGPTPVNIIGRNLLTQIGCTLNFPISPIETVPVKLKPGMDGPKVKQWPLTEEKIKALVEICTEMEKEGKISKIG
PENPYNTPVFAIKKKDSTKWRKLVDFRELNKRTQDFWEVQLGIPHPAGLKKKKSVTVLDVGDAYFSVPLDKDFRKYTA
FTIPSINNETPGIRYQYNVLPQGWKGSPAIFQSSMTKILEPFRKQNPDIVIYQYMDDLYVGSDLEIGQHRTKIEELRQ
HLLKWGFTTPDKKHQKEPPFLWMGYELHPDKWTVQPIVLPEKDSWTVNDIQKLVGKLNWASQIYHGQVDCSPGIWQLD
CTHLEGKVILVAVHVASGYIEAEVIPAETGQETAYFLLKLAGRWPVKVIHTDNGSNFTSAAVKAACWWAGIKQEFGIP
YNPQSQGVVESMNKELKKIIGQVRDQAEHLKTAVQMAVFIHNFKRKGGIGGYSAGERIIDIIATDIQTKELQKQITKI
QNFRVYYRDSRDPIWKGPAKLLWKGEGAVVIQDNSDIKVVPRRKAKIIRDYGKQMAGDDCVAGRQDEDQ
SEQ ID NO: 728
HIV M pol Epigraph2
            FFREDLAFPQGKAREFPSEQTRANSPTRGELQVWGGDNNSPSEAGADRQGTVSFSFPQITLWQRPLVSIKVG
GQIKEALLDTGADDTVLEEMNLPGRWKPKMIGGIGGFIKVRQYDQIPIEICGHKAIGTVLIGPTPVNIIGRNMLTQLG
CTLNFPISPIDTVPVTLKPGMDGPRVKQWPLTEEKIKALTEICKEMEKEGKITKIGPENPYNTPIFAIKKKDSTKWRK
LVDFRELNKKTQDFWEVQLGIPHPAGLKKKKSVTVLDVGDAYFSVPLDESFRKYTAFTIPSTNNETPGIRYQYNVLPQ
GWKGSPAIFQCSMTKILEPFRIKNPEIVIYQYMDDLYVGSDLEIGQHRAKIEELREHLLRWGFTTPDKKHQKEPPFLW
MGYELHPDRWTVQPIELPEKDSWTVNDIQKLVGKLNWASQIYAGIKVRQLCKLLRGTKALTEVVPLTEEAELELAENR
EILKTPVHGVYYDPSKDLVAEIQKQGQGQWTYQIYQEPYKNLKTGKYARKRSAHTNDVRQLTEVVQKIATESIVIWGK
TPKFKLPIQKETWEAWWTDYWQATWIPDWEFVNTPPLVKLWYQLEKDPIVGAETFYVDGAASRETKLGKAGYVTNRGR
QKVVSLTDTTNQKTELHAIHLALQDSGLEVNIVTDSQYALGIIQAQPDRSESEVVNQIIEELIKKEKVYLAWVPAHKG
IGGNEQVDKLVSAGIRKVLFLDGIDKAQEEHERYHSNWRTMASDFNLPPVVAKEIVANCDKCQLKGEAIHGQVDCSPG
MWQLDCTHLEGKIILVAVHVASGYMEAEVIPAETGQETAYFILKLAGRWPVKTIHTDNGSNFTSTTVKAACWWAGIQQ
EFGIPYNPQSQGVVESMNNELKKIIGQVREQAEHLKTAVQMAVFIHNFKRRGGIGGYSAGERIVDIIATDIQTRELQK
QIIKIQNFRVYYRDSRDPLWKGPAKLLWKGEGAVVIQDNSEIKVVPRRKVKIIKDYGKQMAGDDCVASRQDED
SEQ ID NO: 729
HIV M pol Epigraph2 Conserved
            PQITLWQRPLVSIKVGGQIKEALLDTGADDTVLEEMNLPGRWKPKMIGGIGGFIKVRQYDQIPIEICGHKAI
GTVLIGPTPVNIIGRNMLTQLGCTLNFPISPIDTVPVTLKPGMDGPRVKQWPLTEEKIKALTEICKEMEKEGKITKIG
PENPYNTPIFAIKKKDSTKWRKLVDFRELNKKTQDFWEVQLGIPHPAGLKKKKSVTVLDVGDAYFSVPLDESFRKYTA
FTIPSTNNETPGIRYQYNVLPQGWKGSPAIFQCSMTKILEPFRIKNPEIVIYQYMDDLYVGSDLEIGQHRAKIEELRE
HLLRWGFTTPDKKHQKEPPFLWMGYELHPDRWTVQPIELPEKDSWTVNDIQKLVGKLNWASQIYHGQVDCSPGMWQLD
CTHLEGKIILVAVHVASGYMEAEVIPAETGQETAYFILKLAGRWPVKTIHTDNGSNFTSTTVKAACWWAGIQQEFGIP
YNPQSQGVVESMNNELKKIIGQVREQAEHLKTAVQMAVFIHNFKRRGGIGGYSAGERIVDIIATDIQTRELQKQIIKI
QNFRVYYRDSRDPLWKGPAKLLWKGEGAVVIQDNSEIKVVPRRKVKIIKDYGKQMAGDDCVASRQDED
SEQ ID NO: 730
HIV B gag Epigraph1
            MGARASVLSGGELDRWEKIRLRPGGKKKYRLKHIVWASRELERFAVNPGLLETSEGCRQILGQLQPSLQTGS
EELKSLYNTVATLYCVHQRIEVKDTKEALDKIEEEQNKSKKKAQQAAADTGNSSQVSQNYPIVQNLQGQMVHQAISPR
TLNAWVKVVEEKAFSPEVIPMFSALSEGATPQDLNTMLNTVGGHQAAMQMLKETINEEAAEWDRLHPVHAGPIAPGQM
REPRGSDIAGTTSTLQEQIGWMTNNPPIPVGEIYKRWIILGLNKIVRMYSPTSILDIRQGPKEPFRDYVDRFYKTLRA
EQASQEVKNWMTETLLVQNANPDCKTILKALGPAATLEEMMTACQGVGGPGHKARVLAEAMSQVTNSATIMMQRGNFR
NQRKTVKCFNCGKEGHIAKNCRAPRKKGCWKCGKEGHQMKDCTERQANFLGKIWPSHKGRPGNFLQSRPEPTAPPEES
FRFGEETTTPSQKQEPIDKELYPLASLKSLFGNDPSSQ
SEQ ID NO: 731
HIV B gag Epigraph1 Conserved
            PIVQNLQGQMVHQAISPRTLNAWVKVVEEKAFSPEVIPMFSALSEGATPQDLNTMLNTVGGHQAAMQMLKET
INEEAAEWDRLHPVHAGPIAPGQMREPRGSDIAGTTSTLQEQIGWMTNNPPIPVGEIYKRWIILGLNKIVRMYSPTSI
LDIRQGPKEPFRDYVDRFYKTLRAEQASQEVKNWMTETLLVQNANPDCKTILKALGPAATLEEMMTACQGVGGPGHKA
RVL
SEQ ID NO: 732
HIV B gag Epigraph2
            MGARASVLSGGKLDKWEKIRLRPGGKKKYKLKHIVWASRELERFALNPGLLETSEGCKQILGQLQPALQTGS
EELRSLYNTVAVLYCVHQRIDVKDTKEALEKIEEEQNKSKKRAQQAAADTGNNSQVSQNYPIVQNMQGQMVHQPISPR
TLNAWVKVIEEKAFSPEVIPMFTALSEGATPQDLNTMLNTVGGHQAAMQILKETINEEAADWDRLHPVHAGPVAPGQM
REPRGSDIAGTTSNLQEQIGWMTSNPPIPVGEIYKRWIIMGLNKIVRMYSPVSILDIKQGPKEPFRDYVDRFYKVLRA
EQASQDVKNWMTETLLVQNSNPDCKTILKALGPGATLEEMMTACQGVGGPSHKARILAEAMSQVTNSATIMMQKGNFR
NQRKIVKCFNCGKEGHIARNCRAPRKKGCWKCGREGHQMKDCNERQANFLGKIWPSYKGRPGNFLQNRPEPTAPPAES
FRFGEETTTPPQKQEPIDKDLYPLASLRSLFGNDPSS
SEQ ID NO: 733
HIV B gag Epigraph2 Conserved
            PIVQNMQGQMVHQPISPRTLNAWVKVIEEKAFSPEVIPMFTALSEGATPQDLNTMLNTVGGHQAAMQILKET
INEEAADWDRLHPVHAGPVAPGQMREPRGSDIAGTTSNLQEQIGWMTSNPPIPVGEIYKRWIIMGLNKIVRMYSPVSI
LDIKQGPKEPFRDYVDRFYKVLRAEQASQDVKNWMTETLLVQNSNPDCKTILKALGPGATLEEMMTACQGVGGPSHKA
RIL
SEQ ID NO: 734
HIV B nef Epigraph1
            MGGKWSKSSIVGWPAVRERMRRAEPAAEGVGAVSRDLEKHGAITSSNTAATNADCAWLEAQEEEEVGFPVRP
QVPLRPMTYKGALDLSHFLKEKGGLEGLIYSQKRQDILDLWVYHTQGYFPDWQNYTPGPGIRYPLTFGWCFKLVPVEP
EKVEEANEGENNSLLHPMSQHGMDDPEKEVLMWKFDSRLAFHHMARELHPEYYKDC
SEQ ID NO: 735
HIV B nef Epigraph1 Conserved
            GFPVRPQVPLRPMTYKGALDLSHFLKEKGGLEGLIYSQKRQDILDLWVYHTQGYFPDWQNYTPGPGIRYPLT
FGWCFKLVP
SEQ ID NO: 736
HIV B nef Epigraph2
            MGGKWSKSSVVGWPAIRERMRRAEPAADGVGAASRDLERHGAITSSNTAANNAACAWLEAQEDEEVGFPVKP
QVPLRPMTYKAAVDLSHFLKEKGGLEGLIHSQKRQEILDLWVYHTQGFFPDWQNYTPGPGTRFPLTFGWCFKLVPVDP
DKVEEANEGENNCLLHPMSLHGMDDPEREVLVWKFDSRLAFHHVARELHPEYYKNC
SEQ ID NO: 737
HIV B nef Epigraph2 Conserved
GFPVKPQVPLRPMTYKAAVDLSHFLKEKGGLEGLIHSQKRQEILDLWVYHTQGFFPDWQNYTPGPGTRFPLTFGWCFK
LVP
SEQ ID NO: 738
HIV B pol Epigraph1
            FFRENLAFPQGKAREFSSEQTRANSPTRRELQVWGRDNNSLSEAGADRQGTVSFSFPQITLWQRPLVTIKIG
GQLKEALLDTGADDTVLEEMNLPGRWKPKMIGGIGGFIKVRQYDQIPIEICGHKAIGTVLVGPTPVNIIGRNLLTQIG
CTLNFPISPIETVPVKLKPGMDGPKVKQWPLTEEKIKALVEICTEMEKEGKISKIGPENPYNTPVFAIKKKDSTKWRK
LVDFRELNKRTQDFWEVQLGIPHPAGLKKKKSVTVLDVGDAYFSVPLDKDFRKYTAFTIPSINNETPGIRYQYNVLPQ
GWKGSPAIFQSSMTKILEPFRKQNPDIVIYQYMDDLYVGSDLEIGQHRTKIEELRQHLLRWGFTTPDKKHQKEPPFLW
MGYELHPDKWTVQPIVLPEKDSWTVNDIQKLVGKLNWASQIYAGIKVKQLCKLLRGTKALTEVVPLTEEAELELAENR
EILKEPVHGVYYDPSKDLIAEIQKQGQGQWTYQIYQEPFKNLKTGKYARMRGAHTNDVKQLTEAVQKIATESIVIWGK
TPKFKLPIQKETWEAWWTEYWQATWIPEWEFVNTPPLVKLWYQLEKEPIVGAETFYVDGAANRETKLGKAGYVTDRGR
QKVVSLTDTTNQKTELQAIHLALQDSGLEVNIVTDSQYALGIIQAQPDKSESELVSQIIEQLIKKEKVYLAWVPAHKG
IGGNEQVDKLVSAGIRKVLFLDGIDKAQEEHEKYHSNWRAMASDFNLPPVVAKEIVASCDKCQLKGEAMHGQVDCSPG
IWQLDCTHLEGKIILVAVHVASGYIEAEVIPAETGQETAYFLLKLAGRWPVKTIHTDNGSNFTSTTVKAACWWAGIKQ
EFGIPYNPQSQGVVESMNKELKKIIGQVRDQAEHLKTAVQMAVFIHNFKRKGGIGGYSAGERIVDIIATDIQTKELQK
QITKIQNFRVYYRDSRDPLWKGPAKLLWKGEGAVVIQDNSDIKVVPRRKAKIIRDYGKQMAGDDCVASRQDED
SEQ ID NO: 739
HIV B pol Epigraph1 Conserved
            PQITLWQRPLVTIKIGGQLKEALLDTGADDTVLEEMNLPGRWKPKMIGGIGGFIKVRQYDQIPIEICGHKAI
GTVLVGPTPVNIIGRNLLTQIGCTLNFPISPIETVPVKLKPGMDGPKVKQWPLTEEKIKALVEICTEMEKEGKISKIG
PENPYNTPVFAIKKKDSTKWRKLVDFRELNKRTQDFWEVQLGIPHPAGLKKKKSVTVLDVGDAYFSVPLDKDFRKYTA
FTIPSINNETPGIRYQYNVLPQGWKGSPAIFQSSMTKILEPFRKQNPDIVIYQYMDDLYVGSDLEIGQHRTKIEELRQ
HLLRWGFTTPDKKHQKEPPFLWMGYELHPDKWTVQPIVLPEKDSWTVNDIQKLVGKLNWASQIYHGQVDCSPGIWQLD
CTHLEGKIILVAVHVASGYIEAEVIPAETGQETAYFLLKLAGRWPVKTIHTDNGSNFTSTTVKAACWWAGIKQEFGIP
YNPQSQGVVESMNKELKKIIGQVRDQAEHLKTAVQMAVFIHNFKRKGGIGGYSAGERIVDIIATDIQTKELQKQITKI
QNFRVYYRDSRDPLWKGPAKLLWKGEGAVVIQDNSDIKVVPRRKAKIIRDYGKQMAGDDCVASRQDED
SEQ ID NO: 740
HIV B pol Epigraph2
            FFREDLAFPQGEAREFPSEQTRANSPTRGELQVWGGDNNSPSEAGADRQGTVSLSFPQITLWQRPLVTIKVG
GQLKEALLDTGADDTVLEDMNLPGKWKPKMIGGIGGFIKVRQYDQILIEICGHKAIGTVLIGPTPVNIIGRNLLTQLG
CTLNFPISPIDTVPVKLKPGMDGPRVKQWPLTEEKIKALIEICTEMEKEGKISRIGPENPYNTPIFAIKKKDSTKWRK
LVDFRELNKKTQDFWEVQLGIPHPSGLKKKKSVTVLDVGDAYFSVPLDKEFRKYTAFTIPSTNNETPGIRYQYNVLPQ
GWKGSPAIFQCSMTKILEPFRKQNPEIVIYQYMDDLYVGSDLEIEQHRTKIEELRQHLLKWGFTTPDKKHQKEPPFLW
MGYELHPDKWTVQPIMLPEKDSWTVNDIQKLVGKLNWASQIYPGIKVRQLCKLLRGAKALTEVIPLTEEAELELAENR
EILREPVHGVYYDPTKDLIAEIQKQGLGQWTYQIYQEPYKNLKTGKYARTRGAHTNDVRQLTEAVQKITTESIVIWGK
TPKFRLPIQKETWETWWTEYWQATWIPEWEFVNTPPLVKLWYQLEKEPIIGAETFYVDGAANRDTKLGKAGYVTNKGR
QKVVTLTDTTNQKTELQAIYLALQDSGSEVNIVTDSQYALGIIQAQPDKSESELVNQIIEQLIKKEKIYLAWVPAHKG
IGGNEQVDKLVSSGIRKVLFLDGIDKAQEDHEKYHSNWKAMASDFNLPPIVAKEIVASCDKCQLKGEAIHGQVDCSPG
IWQLDCTHLEGKVILVAVHVASGYIEAEVIPAETGQETAYFILKLAGRWPVKTVHTDNGSNFTSATVKAACWWAGVKQ
EFGIPYNPQSQGVVESMNNELKKIIGQIRDQAEHLKTAVQMAVFIHNFKRKGGIGGYSAGERIIDIIATDIQTRELQK
QITKIQNFRVYYRDNRDPLWKGPAKLLWKGEGAVVIQDNSEIKVVPRRKVKIIRDYGKQMAGDDCVAGRQDED
SEQ ID NO: 741
HIV B pol Epigraph2 Conserved
            PQITLWQRPLVTIKVGGQLKEALLDTGADDTVLEDMNLPGKWKPKMIGGIGGFIKVRQYDQILIEICGHKAI
GTVLIGPTPVNIIGRNLLTQLGCTLNFPISPIDTVPVKLKPGMDGPRVKQWPLTEEKIKALIEICTEMEKEGKISRIG
PENPYNTPIFAIKKKDSTKWRKLVDFRELNKKTQDFWEVQLGIPHPSGLKKKKSVTVLDVGDAYFSVPLDKEFRKYTA
FTIPSTNNETPGIRYQYNVLPQGWKGSPAIFQCSMTKILEPFRKQNPEIVIYQYMDDLYVGSDLEIEQHRTKIEELRQ
HLLKWGFTTPDKKHQKEPPFLWMGYELHPDKWTVQPIMLPEKDSWTVNDIQKLVGKLNWASQIYHGQVDCSPGIWQLD
CTHLEGKVILVAVHVASGYIEAEVIPAETGQETAYFILKLAGRWPVKTVHTDNGSNFTSATVKAACWWAGVKQEFGIP
YNPQSQGVVESMNNELKKIIGQIRDQAEHLKTAVQMAVFIHNFKRKGGIGGYSAGERIIDIIATDIQTRELQKQITKI
QNFRVYYRDNRDPLWKGPAKLLWKGEGAVVIQDNSEIKVVPRRKVKIIRDYGKQMAGDDCVAGRQDED
SEQ ID NO: 742
HIV C gag Epigraph1
            MGARASILRGGKLDKWEKIRLRPGGKKHYMLKHLVWASRELERFALNPGLLETSEGCKQIMKQLQPALQTGT
EELRSLYNTVATLYCVHEKIEVRDTKEALDKIEEEQNKSQQKTQQAKAADGKVSQNYPIVQNLQGQMVHQAISPRTLN
AWVKVIEEKAFSPEVIPMFTALSEGATPQDLNTMLNTVGGHQAAMQMLKDTINEEAAEWDRLHPVHAGPIAPGQMREP
RGSDIAGTTSTLQEQIAWMTSNPPIPVGDIYKRWIILGLNKIVRMYSPVSILDIKQGPKEPFRDYVDRFFKTLRAEQA
TQDVKNWMTDTLLVQNANPDCKTILRALGPGATLEEMMTACQGVGGPGHKARVLAEAMSQANSNIMMQRSNFKGPKRI
VKCFNCGKEGHIARNCRAPRKKGCWKCGKEGHQMKDCTERQANFLGKIWPSHKGRPGNFLQSRPEPTAPPAEPTAPPA
ESFRFEETTPAPKQEPKDREPLTSLKSLFGSDPLSQ
SEQ ID NO: 743
HIV C gag Epigraphl Conserved
            PIVQNLQGQMVHQAISPRTLNAWVKVIEEKAFSPEVIPMFTALSEGATPQDLNTMLNTVGGHQAAMQMLKDT
INEEAAEWDRLHPVHAGPIAPGQMREPRGSDIAGTTSTLQEQIAWMTSNPPIPVGDIYKRWIILGLNKIVRMYSPVSI
LDIKQGPKEPFRDYVDRFFKTLRAEQATQDVKNWMTDTLLVQNANPDCKTILRALGPGATLEEMMTACQGVGGPGHKA
RVL
SEQ ID NO: 744
HIV C gag Epigraph2
            MGARASVLRGEKLDKWERIRLRPGGKKRYMLKHIVWASRELEKFALNPGLLETAEGCKQIIKQLHPALQTGT
EELKSLFNTVATLYCVHKKIDVRDTKEALDKIEEEQNKCQQKTQQAEAADKGKVSQNYPIVQNLQGQMVHQALSPRTL
NAWVKVVEEKAFSPEIIPMFTALSEGATPTDLNTMLNTVGGHQAAMQMLKDTINEEAAEWDRVHPVHAGPVAPGQMRE
PRGSDIAGTTSNLQEQIAWMTNNPPIPVGEIYKRWIILGLNKIVRMYSPVSILDIRQGPKEPFRDYVDRFFKVLRAEQ
ATQEVKNWMTETLLVQNANPDCKTILRALGPGASLEEMMTACQGVGGPSHKARVLAEAMSQANNANIMMQRSNFKGSK
RIVKCFNCGKEGHIAKNCRAPRKKGCWKCGREGHQMKDCNERQANFLGKIWPSNKGRPGNFLQNRPEPTAPPAEPTAP
PAESFKFEETTPAPKQESKDREPLISLKSLFGNDPLSQ
SEQ ID NO: 745
HIV C gag Epigraph2 Conserved
            PIVQNLQGQMVHQALSPRTLNAWVKVVEEKAFSPEIIPMFTALSEGATPTDLNTMLNTVGGHQAAMQMLKDT
INEEAAEWDRVHPVHAGPVAPGQMREPRGSDIAGTTSNLQEQIAWMTNNPPIPVGEIYKRWIILGLNKIVRMYSPVSI
LDIRQGPKEPFRDYVDRFFKVLRAEQATQEVKNWMTETLLVQNANPDCKTILRALGPGASLEEMMTACQGVGGPSHKA
RVL
SEQ ID NO: 746
HIV C nef Epigraph1
            MGGKWSKSSIVGWPAVRERIRRTEPAAEGVGAASQDLDKYGALTSSNTAHNNADCAWLQAQEEEEEVGFPVR
PQVPLRPMTYKAAFDLSFFLKEKGGLEGLIYSKKRQEILDLWVYHTQGFFPDWQNYTPGPGVRYPLTFGWCFKLVPVD
PREVEEANEGENNCLLHPMSQHGMEDEDREVLKWQFDSSLARRHMARELHPEYYKDC
SEQ ID NO: 747
HIV C nef Epigraph1 Conserved
            GFPVRPQVPLRPMTYKAAFDLSFFLKEKGGLEGLIYSKKRQEILDLWVYHTQGFFPDWQNYTPGPGVRYPLT
FGWCFKLV
SEQ ID NO: 748
HIV C nef Epigraph2
            MGSKWSKSSIVGWPAVRERMRRAEPAAEGVGAASRDLDKHGALTSSNTPANNADCAWLEAQEEEGEVGFPVK
PQVPLRPMTYKGAFDLGFFLKEKGGLDGLIYSKKRQDILDLWVYNTQGYFPDWQNYTPGPGIRYPLTFGWCYKLVPVD
PSEVEEANKGENNCLLHPMSLHGMEDEHREVLKWKFDSSLARRHLAREKHPEFYKDC
SEQ ID NO: 749
HIV C nef Epigraph2 Conserved
            GFPVKPQVPLRPMTYKGAFDLGFFLKEKGGLDGLIYSKKRQDILDLWVYNTQGYFPDWQNYTPGPGIRYPLT
FGWCYKLV
SEQ ID NO: 750
HIV C pol Epigraph1
            FFRENLAFPQGEAREFPSEQTRANSPTSRANSPTSRELQVRGDNPRSEAGAERQGTLNFPQITLWQRPLVSI
KVGGQIKEALLDTGADDTVLEEINLPGKWKPKMIGGIGGFIKVRQYDQILIEICGKKAIGTVLVGPTPVNIIGRNMLT
QLGCTLNFPISPIETVPVKLKPGMDGPKVKQWPLTEEKIKALTAICEEMEKEGKITKIGPENPYNTPVFAIKKKDSTK
WRKLVDFRELNKRTQDFWEVQLGIPHPAGLKKKKSVTVLDVGDAYFSVPLDEGFRKYTAFTIPSINNETPGIRYQYNV
LPQGWKGSPAIFQSSMTKILEPFRAQNPEIVIYQYMDDLYVGSDLEIGQHRAKIEELREHLLKWGFTTPDKKHQKEPP
FLWMGYELHPDKWTVQPIQLPEKDSWTVNDIQKLVGKLNWASQIYPGIKVRQLCKLLRGAKALTDIVPLTEEAELELA
ENREILKEPVHGVYYDPSKDLIAEIQKQGHDQWTYQIYQEPFKNLKTGKYAKMRTAHTNDVKQLTEAVQKIAMESIVI
WGKTPKFRLPIQKETWETWWTDYWQATWIPEWEFVNTPPLVKLWYQLEKEPIAGAETFYVDGAANRETKIGKAGYVTD
RGRQKIVSLTETTNQKTELQAIQLALQDSGSEVNIVTDSQYALGIIQAQPDKSESELVNQIIEQLIKKERVYLSWVPA
HKGIGGNEQVDKLVSSGIRKVLFLDGIDKAQEEHEKYHSNWRAMASEFNLPPIVAKEIVASCDKCQLKGEAIHGQVDC
SPGIWQLDCTHLEGKIILVAVHVASGYIEAEVIPAETGQETAYYILKLAGRWPVKVIHTDNGSNFTSAAVKAACWWAG
IQQEFGIPYNPQSQGVVESMNKELKKIIGQVRDQAEHLKTAVQMAVFIHNFKRKGGIGGYSAGERIIDIIATDIQTKE
LQKQIIKIQNFRVYYRDSRDPIWKGPAKLLWKGEGAVVIQDNSDIKVVPRRKVKIIKDYGKQMAGADCVAGRQDEDQ
SEQ ID NO: 751
HIV C pol Epigraph1 Conserved
            PQITLWQRPLVSIKVGGQIKEALLDTGADDTVLEEINLPGKWKPKMIGGIGGFIKVRQYDQILIEICGKKAI
GTVLVGPTPVNIIGRNMLTQLGCTLNFPISPIETVPVKLKPGMDGPKVKQWPLTEEKIKALTAICEEMEKEGKITKIG
PENPYNTPVFAIKKKDSTKWRKLVDFRELNKRTQDFWEVQLGIPHPAGLKKKKSVTVLDVGDAYFSVPLDEGFRKYTA
FTIPSINNETPGIRYQYNVLPQGWKGSPAIFQSSMTKILEPFRAQNPEIVIYQYMDDLYVGSDLEIGQHRAKIEELRE
HLLKWGFTTPDKKHQKEPPFLWMGYELHPDKWTVQPIQLPEKDSWTVNDIQKLVGKLNWASQIYHGQVDCSPGIWQLD
CTHLEGKIILVAVHVASGYIEAEVIPAETGQETAYYILKLAGRWPVKVIHTDNGSNFTSAAVKAACWWAGIQQEFGIP
YNPQSQGVVESMNKELKKIIGQVRDQAEHLKTAVQMAVFIHNFKRKGGIGGYSAGERIIDIIATDIQTKELQKQIIKI
QNFRVYYRDSRDPIWKGPAKLLWKGEGAVVIQDNSDIKVVPRRKVKIIKDYGKQMAGADCVAGRQDEDQ
SEQ ID NO: 752
HIV C pol Epigraph2
            FFRENLAFQQGEAREFPSEQARANSPTSRANSPTSRELQVRGDNPCSEAGAERQGTFNFPQITLWQRPLVTI
KVGGQIKEALLDTGADDTVLEDINLPGKWKPRMIGGIGGFIKVRQYDQIPIEICGKKAIGSVLVGPTPVNIIGRNLLT
QLGCTLNFPISPIETIPVKLKPGMDGPRVKQWPLTEEKIKALTEICEEMEKEGKISKIGPENPYNTPIFAIKKKDSTK
WRKLVDFRELNKRTQDFWEVQLGIPHPAGLKKKKSVTVLDVGDAYFSVPLDESFRKYTAFTIPSTNNETPGIRYQYNV
LPQGWKGSPAIFQSSMTRILEPFRAKNPEIVIYQYMDDLYVGSDLEIEQHRAKIEELREHLLRWGFTTPDKKHQKEPP
FLWMGYELHPDKWTVQPIQLPEKESWTVNDIQKLVGKLNWASQIYPGIKVKQLCKLLRGTKALTDIVPLTEEAELELA
ENREILREPVHGVYYDPSKELIAEIQKQGQDQWTYQIYQEPFKNLKTGKYAKRRTAHTNDVRQLTEAVQKIALESIVI
WGKIPKFRLPIQKETWEIWWTDYWQATWIPDWEFVNTPPLVKLWYQLEKEPIAGVETFYVDGAANRETKLGKAGYVTD
KGRQKIVTLTETTNQKAELQAIQLALQDSGPEVNIVTDSQYALGIIQAQPDKSESEIVNQIIEQLINKERIYLSWVPA
HKGIGGNEQVDKLVSNGIRKVLFLDGIDKAQEEHEKYHNNWRAMASDFNLPPVVAKEIVASCDQCQLKGEAMHGQVDC
SPGIWQLDCTHLEGKVILVAVHVASGYMEAEVIPAETGQETAYFILKLAGRWPVKIIHTDNGSNFTSTAVKAACWWAG
IKQEFGIPYNPQSQGVVESMNKELKKIIGQVREQAEHLKTAVQMAVFIHNFKRRGGIGGYSAGERIIDIIASDIQTKE
LQKQITKIQNFRVYYRDSRDPIWKGPAKLLWKGEGAVVLQDNSDIKVVPRRKAKIIRDYGKQMAGDDCVAGRQDED
SEQ ID NO: 753
HIV C pol Epigraph2 Conserved
            PQITLWQRPLVTIKVGGQIKEALLDTGADDTVLEDINLPGKWKPRMIGGIGGFIKVRQYDQIPIEICGKKAI
GSVLVGPTPVNIIGRNLLTQLGCTLNFPISPIETIPVKLKPGMDGPRVKQWPLTEEKIKALTEICEEMEKEGKISKIG
PENPYNTPIFAIKKKDSTKWRKLVDFRELNKRTQDFWEVQLGIPHPAGLKKKKSVTVLDVGDAYFSVPLDESFRKYTA
FTIPSTNNETPGIRYQYNVLPQGWKGSPAIFQSSMTRILEPFRAKNPEIVIYQYMDDLYVGSDLEIEQHRAKIEELRE
HLLRWGFTTPDKKHQKEPPFLWMGYELHPDKWTVQPIQLPEKESWTVNDIQKLVGKLNWASQIYHGQVDCSPGIWQLD
CTHLEGKVILVAVHVASGYMEAEVIPAETGQETAYFILKLAGRWPVKIIHTDNGSNFTSTAVKAACWWAGIKQEFGIP
YNPQSQGVVESMNKELKKIIGQVREQAEHLKTAVQMAVFIHNFKRRGGIGGYSAGERIIDIIASDIQTKELQKQITKI
QNFRVYYRDSRDPIWKGPAKLLWKGEGAVVLQDNSDIKVVPRRKAKIIRDYGKQMAGDDCVAGRQDE
SEQ ID NO: 754
HIV M Gag episensus EG-0, Tailored
            MGARASVLSGGKLDAWEKIRLRPGGKKKYRLKHLVWASRELERFALNPGLLETSEGCRQILGQLQPSLQTGS
EELKSLYNTVATLYCVHQRIEVKDTKEALDKIEEEQNKSKKKAQQAAADTGNSSQVSQNYPIVQNLQGQMVHQAISPR
TLNAWVKVVEEKAFSPEVIPMFSALSEGATPQDLNTMLNTVGGHQAAMQMLKETINEEAAEWDRLHPVHAGPIAPGQM
REPRGSDIAGTTSTLQEQIGWMTNNPPIPVGEIYKRWIILGLNKIVRMYSPVSILDIRQGPKEPFRDYVDRFYKTLRA
EQATQEVKNWMTETLLVQNANPDCKTILKALGPAATLEEMMTACQGVGGPGHKARVLAEAMSQVTNSATIMMQRGNFK
GQKRIKCFNCGKEGHIARNCRAPRKKGCWKCGKEGHQMKDCTERQANFLGKIWPSHKGRPGNFLQSRPEPTAQSRPEP
TAPPAESFRPQPTAPPEESFRFGEETTTPSQKQEPIDKELYPLASLKSLFGNDPLSQY
SEQ ID NO: 755
HIV M gag episensus EG-0 Conserved, Tailored
            PIVQNLQGQMVHQAISPRTLNAWVKVVEEKAFSPEVIPMFSALSEGATPQDLNTMLNTVGGHQAAMQMLKET
INEEAAEWDRLHPVHAGPIAPGQMREPRGSDIAGTTSTLQEQIGWMTNNPPIPVGEIYKRWIILGLNKIVRMYSPVSI
LDIRQGPKEPFRDYVDRFYKTLRAEQATQEVKNWMTETLLVQNANPDCKTILKALGPAATLEEMMTACQGVGGPGHKA
RVL
SEQ ID NO: 756
HIV M gag CEN-1, Tailored
            MGARASVLTGGKLDAWERIRLRPGGKKKYRMKHLVWASRELERFAINPGLLETAEGCQQIIEQLQSTLKTGS
EELKSLFNTVATLWCVHQRIEIKDTKEALDKLEEVQNKSQQKTQQAAAGTGSSSKVSQNYPIVQNAQGQMVHQPLSPR
TLNAWVKVVEEKGFNPEVIPMFSALSDGATPQDLNMMLNIVGGHQAAMQMLKDTINEEAAEWDRVHPVHAGPIPPGQM
REPRESDIAGTTSNLQEQIGWMTSNPPIPVGDIYKRWIILGLHKIVRMYSPVGILDIKQGPKEPFRDYVDRFFKTLRA
EQASQEVKNWMTETLLIQNANPDCKSILKALGTGATLEEMMTACQGVGGPSHKARVLAEAMSQAQHANIMMQRGNFKG
QRKIKCFNCGKEGHLARNCRAPRKRGCWKCGQEGHQMKDCNERQANFLGKIWPSNKGRPGNFPQSRPEPTAPRTEPTA
PPARPEPTAPPLQSRLEPTAPPAEPTAPPAENWGMGEEITSLLKQEQKDKEHPPPLVSLKSLFGNDPLLQ
SEQ ID NO: 757
HIV M gag CEN-1 Conserved, Tailored
            PIVQNAQGQMVHQPLSPRTLNAWVKVVEEKGFNPEVIPMFSALSDGATPQDLNMMLNIVGGHQAAMQMLKDT
INEEAAEWDRVHPVHAGPIPPGQMREPRESDIAGTTSNLQEQIGWMTSNPPIPVGDIYKRWIILGLHKIVRMYSPVGI
LDIKQGPKEPFRDYVDRFFKTLRAEQASQEVKNWMTETLLIQNANPDCKSILKALGTGATLEEMMTACQGVGGPSHKA
RVL
SEQ ID NO: 758
HIV M gag CEN-2, Tailored
            MGARASILRGGKLDKWEKIRLRPGGKKHYMLKHIVWASRELEKFALNPDLLETSEGCKQIIKQLQPALQTGT
EELRSLFNTVATLYCVHEKIEVRDTKEALDKVEEEQNKSQQKTQQAKAADGKVSQNYPIVQNAQGQMVHQALSPRTLN
AWVKVIEEKAFSPEVIPMFTALSEGATPSDLNTMLNTIGGHQAAMQMLKDTINEEAAEWDRVHPVHAGPVAPGQMREP
RGSDIAGSTSTLQEQIAWMTSNPPIPVGDIYKRWIILGLNKIVKMYSPVSILDIKQGPKEPFRDYVDRFFKTLRAEQA
TQDVKNWMTDTLLVQNANPDCKTILRALGPGATLEEMMTACQGVGGPSHKARVLAEAMSQANSNIMMQRSNFKGPKRI
VKCFNCGKEGHIAKNCRAPRKKGCWKCGREGHQMKDCNERQANFLGKIWPSNKGRPGNFLQNRPEPTAPPLQSRLEPT
APLEPTAPPEPTAPPAVVPTAPPVEPTAPPAEPTAPPAESFRFEETTPAPKQEPKDREPLTSLKSLFGSDPLSQ
SEQ ID NO: 759
HIV M gag CEN-2 Conserved, Tailored
            PIVQNAQGQMVHQALSPRTLNAWVKVIEEKAFSPEVIPMFTALSEGATPSDLNTMLNTIGGHQAAMQMLKDT
INEEAAEWDRVHPVHAGPVAPGQMREPRGSDIAGSTSTLQEQIAWMTSNPPIPVGDIYKRWIILGLNKIVKMYSPVSI
LDIKQGPKEPFRDYVDRFFKTLRAEQATQDVKNWMTDTLLVQNANPDCKTILRALGPGATLEEMMTACQGVGGPSHKA
RVL
SEQ ID NO: 760
HIV M gag CEN-3, Tailored
            MGSRASVLSGGELDRWEKIRLRPGGKKKYKLKHIVWASRELERFAVNPGLLETSEGCKQILGQLQPALQTGS
EELRSLYNTVAVLYCVHQRIDVKDTKEALEKIEEEQNKCKKKAQQAAAAADTGNNSQVSQNYPIVQNIQGQMVHQALS
PRTLNAWVKVIEEKAFSPEVIPMFTALSEGATPSDLNTMLNTIGGHQAAMQMLKDTINEEAADWDRLHPVQAGPVAPG
QMRDPRGSDIAGTTSNLQEQIGWMTSNPPIPVGDIYKRWIIMGLNKIVRMYSPTSILDIKQGPKEPFRDYVDRFFKTL
RAEQASQEVKNWMTETLLVQNSNPDCKTILKALGPGATLEEMMTACQGVGGPSHKARVLAEAMSQATNSAAIMMQRGN
FRNQRKIVKCFNCGKEGHIAKNCRAPRKRGCWKCGREGHQMKDCNERQANFLGRIWPSNKGRPGNFLQNRPEPTAPNF
LQSRPEPSAPPEPTAPPEESFRFGEETATPSQKQEPTDKELYPLASLRSLFGNDPSSQ
SEQ ID NO: 761
HIV M gag CEN-3 Conserved, Tailored
            PIVQNIQGQMVHQALSPRTLNAWVKVIEEKAFSPEVIPMFTALSEGATPSDLNTMLNTIGGHQAAMQMLKDT
INEEAADWDRLHPVQAGPVAPGQMRDPRGSDIAGTTSNLQEQIGWMTSNPPIPVGDIYKRWIIMGLNKIVRMYSPTSI
LDIKQGPKEPFRDYVDRFFKTLRAEQASQEVKNWMTETLLVQNSNPDCKTILKALGPGATLEEMMTACQGVGGPSHKA
RVL
SEQ ID NO: 762
HIV M gag CEN-4, Tailored
            MGTRASVLSGGELDRWEKIRLRPGGKKKYKLKHIVWASRELERFAVNPGLLETAEGCRQILEQLQPALQTGS
EELRSLYNTVAVLYCVHQRIDVKDTKEALEKIEEEQNKCKKKAQQTAADTGNNSQVSQNYPIVQNMQGQMVHQPISPR
TLNAWVKVIEEKAFSPEVIPMFTALSEGATPHDLNTMLNTIGGHQAAMQMLKDTINEEAAEWDRVHPVHAGPVAPGQM
REPKGSDIAGTTSNLQEQIGWMTHNPPIPVGDIYKRWIIMGLNKIVRMYSPTSILDIKQGPKEPFRDYVDRFFKTLRA
EQASQDVKNWMTETLLVQNSNPDCKTILKALGPGATLEEMMSACQGVGGPSHKARILAEAMSQATNSANIMMQRGNFR
NQRKTVKCFNCGKEGHIAKNCRAPRKRGCWKCGREGHQMKDCNERQANFLGKIWPSYKGRPGNFLQNRPEPTAPPEPT
APPEESFGFGEETTTPPQKQEPIDKDLYPLASLRSLFGNDPSSQ
SEQ ID NO: 763
HIV M gag CEN-4 Conserved, Tailored
            PIVQNMQGQMVHQPISPRTLNAWVKVIEEKAFSPEVIPMFTALSEGATPHDLNTMLNTIGGHQAAMQMLKDT
INEEAAEWDRVHPVHAGPVAPGQMREPKGSDIAGTTSNLQEQIGWMTHNPPIPVGDIYKRWIIMGLNKIVRMYSPTSI
LDIKQGPKEPFRDYVDRFFKTLRAEQASQDVKNWMTETLLVQNSNPDCKTILKALGPGATLEEMMSACQGVGGPSHKA
RIL
SEQ ID NO: 764
HIV M gag CEN-5, Tailored
            MGARASILSGGKLDAWERIRLRPGGKKKYRMKHLVWASRELDRFALNPSLLETAEGCQQIMEQLQPALKTGT
EELRSLFNTVATLYCVHQRIDVKDTKEALDKIEEIQNKSKQKTQQAAADTGNSSKVSQNYPIVQNAQGQMIHQSLSPR
TLNAWVKVIEEKAFSPEVIPMFTALSEGATPQDLNMMLNIVGGHQAAMQMLKDTINEEAAEWDRVHPVHAGPIPPGQM
REPRGGDIAGTTSTPQEQIGWMTSNPPIPVGDIYKRWIILGLHKLVRMYSPVSILDIKQGPKEPFRDYVDRFFKTLRA
EQATQEVKGWMTETLLIQNANPDCKSILRALGPGATLEEMMTACQGVGGPSHKARVLAEAMSQVQHTNIMMQRGNFRG
QKRIKCFNCGKEGHLARNCRAPRKRGCWKCGREGHQMKDCNERQANFLGKIWPSSKGRPGNFPQSRPEPTAPQNRLEP
TAPPAEPTAPPAEIFGMGEEITSPPKQEQKDREQAPPLVSLKSLFGNDLLSQ
SEQ ID NO: 765
HIV M gag CEN-5 Conserved, Tailored
            PIVQNAQGQMIHQSLSPRTLNAWVKVIEEKAFSPEVIPMFTALSEGATPQDLNMMLNIVGGHQAAMQMLKDT
INEEAAEWDRVHPVHAGPIPPGQMREPRGGDIAGTTSTPQEQIGWMTSNPPIPVGDIYKRWIILGLHKLVRMYSPVSI
LDIKQGPKEPFRDYVDRFFKTLRAEQATQEVKGWMTETLLIQNANPDCKSILRALGPGATLEEMMTACQGVGGPSHKA
RVL
SEQ ID NO: 766
HIV C gag episensus EG-0, Tailored
            MGARASILRGGKLDKWEKIRLRPGGKKHYMLKHLVWASRELERFALNPGLLETSEGCKQIMKQLQPALQTGT
EELRSLYNTVATLYCVHEKIEVRDTKEALDKIEEEQNKSQQKTQQAKAADGKVSQNYPIVQNLQGQMVHQAISPRTLN
AWVKVIEEKAFSPEVIPMFTALSEGATPQDLNTMLNTVGGHQAAMQMLKDTINEEAAEWDRLHPVHAGPVAPGQMREP
RGSDIAGTTSTLQEQIAWMTSNPPIPVGDIYKRWIILGLNKIVRMYSPVSILDIKQGPKEPFRDYVDRFFKTLRAEQA
TQDVKNWMTDTLLVQNANPDCKTILRALGPGATLEEMMTACQGVGGPGHKARVLAEAMSQANSNIMMQRSNFKGPKRI
VKCFNCGKEGHIARNCRAPRKKGCWKCGKEGHQMKDCTERQANFLGKIWPSHKGRPGNFLQSRPEPTAPPAEPTAPPA
ESFRFEETTPAPKQEPKDREPLTSLKSLFGSDPLSQ
SEQ ID NO: 767
HIV C gag episensus EG-0 Conserved, Tailored
            PIVQNLQGQMVHQAISPRTLNAWVKVIEEKAFSPEVIPMFTALSEGATPQDLNTMLNTVGGHQAAMQMLKDT
INEEAAEWDRLHPVHAGPVAPGQMREPRGSDIAGTTSTLQEQIAWMTSNPPIPVGDIYKRWIILGLNKIVRMYSPVSI
LDIKQGPKEPFRDYVDRFFKTLRAEQATQDVKNWMTDTLLVQNANPDCKTILRALGPGATLEEMMTACQGVGGPGHKA
RVL
SEQ ID NO: 768
HIV C gag CEN-1, Tailored
            MGARASILRGEKLDKWEKIKLRPGGKKRYMLKHLIWASRELERFALNPSLLETSEGCKQIIKQLQPALKTGT
EELRSLFNTVATLYCVHAGIEVRDTKEALDRIEEEQNKCQQKTQQAEAADKGKVSQNYPIVQNAQGQMVHQALSPRTL
NAWVKVVEEKAFSPEIIPMFTALSEGATPSDLNSMLNTVGGHQAAMQMLKDTINDEAAEWDRVHPVHAGPIAPGQMRE
PRGSDIAGTTSNLQEQIAWMTNNPPIPVGEIYKRWIILGLNKIVRMYSPVSILDIRQGPKEPFRDYVDRFFKCLRAEQ
ATQEVKNWMTDTLLIQNANPDCKTILKALGPGASLEEMMTACQGVGGPSHKARVLAEAMSQVNNANIMMQRGNFKGPK
RIIKCFNCGKEGHLARNCRAPRKKGCWKCGQEGHQMKDCSNERQANFLGKLWPSHKGGRPGNFLQNRPEPTAPPVEPT
APPAEPTAPPAESFKFEETTPVPKQELKDREPLISLKSLFGNDPLSQ
SEQ ID NO: 769
HIV C gag CEN-1 Conserved, Tailored
            IVQNAQGQMVHQALSPRTLNAWVKVVEEKAFSPEIIPMFTALSEGATPSDLNSMLNTVGGHQAAMQMLKDTI
NDEAAEWDRVHPVHAGPIAPGQMREPRGSDIAGTTSNLQEQIAWMTNNPPIPVGEIYKRWIILGLNKIVRMYSPVSIL
DIRQGPKEPFRDYVDRFFKCLRAEQATQEVKNWMTDTLLIQNANPDCKTILKALGPGASLEEMMTACQGVGGPSHKAR
VL
SEQ ID NO: 770
HIV C gag CEN-2, Tailored
            MGARASILRGEKLDKWERIRLRPGGKKHYMIKHLVWASRELEKFALNPGLLETADGCKQIIKQLHPALQTGT
EELKSLYNTVATLYCVHERIEVRDTKEALDRIEEEQNKCQQKTQQAEAADKGKVSQNYPIVQNAQGQMVHQPISPRTL
NAWVKVVEEKAFSPEIIPMFTALSEGATPTDLNTMLNTIGGHQAAMQILKDTINEEAVEWDRLHPVQAGPVAPGQIRE
PRGSDIAGTTSNLQEQIAWMTGNPPVPVGDIYKRWIIMGLNKIVRMYSPVSILDIRQGPKEPFRDYVDRFFKVLRAEQ
ATQEVKNWMTETLLVQNANPDCKIILKGLGPAATLEEMMTACQGVGGPSHKARVLAEAMSQVNNTNIMMQKSNFKGPK
RTVKCFNCGKEGHIAKNCRAPRKKGCWKCGREGHQMKDCNERQANFLGKIWPSQKGRPGNFLQNRPEPTAPRPEPTAP
PRLEPTAPPAEPSAPPAESFRFEGTTPAPKQESKDREPLISLKSLFGNDPLSQ
SEQ ID NO: 771
HIV C gag CEN-2 Conserved, Tailored
            PIVQNAQGQMVHQPISPRTLNAWVKVVEEKAFSPEIIPMFTALSEGATPTDLNTMLNTIGGHQAAMQILKDT
INEEAVEWDRLHPVQAGPVAPGQIREPRGSDIAGTTSNLQEQIAWMTGNPPVPVGDIYKRWIIMGLNKIVRMYSPVSI
LDIRQGPKEPFRDYVDRFFKVLRAEQATQEVKNWMTETLLVQNANPDCKIILKGLGPAATLEEMMTACQGVGGPSHKA
RVL
SEQ ID NO: 772
HIV C gag CEN-3, Tailored
            MGARASILRGEKLDRWERIRLRPGGKKCYMLKHIVWASRELERFSLNPGLLETAEGCKQIIKQLHPALQTGT
EELKSLFNTVATLYCVHKKIDVRDTKEALDKVEEEQNKCQQKTQQAKAADEKVSQNYPIVQNIQGQMVHQALSPRTLN
AWVKVVEEKAFSPEIIPMFTALSEEATPQDLNTMLNAVGGHQAAMQMLKETINEEAAEWDRVHPVHAGPIAPGQMREP
RGSDIAGTTSNLQEQIAWMTNNPPIPVGEIYKRWIILGLNKIVRMYSPVSILDIRQGPKEPFRDYVDRFFRVLRAEQA
TQEVKNWMTDTLLIQNANPDCKTILKALGPGASLEEMMTACQGVGGPSHKARVLAEAMSQANNINIMMQRGNFKGPKR
TVKCFNCGKEGHIAKNCRAPRKRGCWKCGKEGHQMKDCNERQANFLGRIWPSHKGRPGNFLQNRPEPTAPSAESFRQN
RTEPTAPPARLEPTAPPAEPSAPPVESFRFEETTPALKQESKDREPLTSLRSLFGSDPLFQ
SEQ ID NO: 773
HIV C gag CEN-3 Conserved, Tailored
            PIVQNIQGQMVHQALSPRTLNAWVKVVEEKAFSPEIIPMFTALSEEATPQDLNTMLNAVGGHQAAMQMLKET
INEEAAEWDRVHPVHAGPIAPGQMREPRGSDIAGTTSNLQEQIAWMTNNPPIPVGEIYKRWIILGLNKIVRMYSPVSI
LDIRQGPKEPFRDYVDRFFRVLRAEQATQEVKNWMTDTLLIQNANPDCKTILKALGPGASLEEMMTACQGVGGPSHKA
RVL
SEQ ID NO: 774
HIV C gag CEN-4, Tailored
            MGARASVLRGEKLDKWERIRLRPGGKKQYMLKHIVWASRELEKFALNPGLLETAEGCKQIIKQLHPALQTGT
EELRSLFNTVATLYCVHKGIDVRDTKEALDKVEEEQNKCQQKTQQAEADKKVSQNYPIVQNIQGQMVHQPLSPRTLNA
WVKVVEEKAFSPEVIPMFSALSEGATPGDLNTMLNTIGGHQAAMQMLKDTINDEAAEWDRLHPVHAGPIAPGQMREPR
GSDIAGTTSNLQEQIAWMTNNPPVPVGEIYKRWIVLGLNKIVRMYSPVSILDIRQGPKEPFRDYVDRFFRTLRAEQAT
QEVKNWMTETLLVQNANPDCKNILRALGPGASLEEMMTACQGVGGPSHKARVLAEAMSQANNTNIMMQKSNFKGPRRI
VKCFNCGKEGHIAKNCRAPRKRGCWKCGKEGHQMKDCNERQANFLGKIWPSNKGRPGNFLQNRPEPTAPQSRPEPTAP
LEPTAPPAEPTAPPAESFKFEETTPAPKQEQKDREPLISLKSLFGNDPLSQ
SEQ ID NO: 775
HIV C gag CEN-4 Conserved, Tailored
            PIVQNIQGQMVHQPLSPRTLNAWVKVVEEKAFSPEVIPMFSALSEGATPGDLNTMLNTIGGHQAAMQMLKDT
INDEAAEWDRLHPVHAGPIAPGQMREPRGSDIAGTTSNLQEQIAWMTNNPPVPVGEIYKRWIVLGLNKIVRMYSPVSI
LDIRQGPKEPFRDYVDRFFRTLRAEQATQEVKNWMTETLLVQNANPDCKNILRALGPGASLEEMMTACQGVGGPSHKA
RVL
SEQ ID NO: 776
HIV C gag CEN-5, Tailored
            MGARASVLRGEKLDKWERIRLRPGGKKRYMLKHIVWASRELEKFALNPGLLETAEGCKQIIKQLQPALQTGT
EELKSLFNTVATLYCVHEKIDVRDTKEALDRIEEEQNKCQQKTQQAKAADEKVSQNYPIVQNAQGQMVHQALSPRTLN
AWVKVIEEKGFNPEVIPMFTALSDGATPQDLNSMLNTVGGHQAAMQILKDTINEEAAEWDRVHPVHAGPIAPGQMREP
RGSDIAGTTSNLQEQIAWMTGNPPIPVGEIYKRWIILGLNKIVRMYSPVSILDIRQGPKEPFRDYVDRFFKALRAEQA
TQEVKNWMTETLLVQNANPDCKNILRALGPGASLEEMMTACQGVGGPSHKARVLAEAMSQANNTNIMMQRNNFKGPKR
IIKCFNCGKEGHIAKNCRAPRKKGCWKCGREGHQMKDCNERQANFLGRIWPSHKGGRPGNFLQNRPEPTAPPVEPTAP
PAEPTAPPAESFKFEETTPTPKQEQKDREPLISLKSLFGNDPLSQ
SEQ ID NO: 777
HIV C gag CEN-5 Conserved, Tailored
            PIVQNAQGQMVHQALSPRTLNAWVKVIEEKGFNPEVIPMFTALSDGATPQDLNSMLNTVGGHQAAMQILKDT
INEEAAEWDRVHPVHAGPIAPGQMREPRGSDIAGTTSNLQEQIAWMTGNPPIPVGEIYKRWIILGLNKIVRMYSPVSI
LDIRQGPKEPFRDYVDRFFKALRAEQATQEVKNWMTETLLVQNANPDCKNILRALGPGASLEEMMTACQGVGGPSHKA
RVL
SEQ ID NO: 778
HIV B gag episensus EG-0, Tailored
            MGARASVLSGGELDRWEKIRLRPGGKKKYKLKHIVWASRELERFAVNPGLLETSEGCRQILGQLQPSLQTGS
EELKSLYNTVATLYCVHQKIDVKDTKEALDKIEEEQNKSKKKAQQAAADTGNSSQVSQNYPIVQNLQGQMVHQAISPR
TLNAWVKVVEEKAFSPEVIPMFSALSEGATPQDLNTMLNTVGGHQAAMQMLKETINEEAAEWDRLHPVHAGPIAPGQM
REPRGSDIAGTTSTLQEQIGWMTNNPPIPVGEIYKRWIILGLNKIVRMYSPTSILDIRQGPKEPFRDYVDRFYKTLRA
EQASQEVKNWMTETLLVQNANPDCKTILKALGPAATLEEMMTACQGVGGPGHKARVLAEAMSQVTNSATIMMQRGNFR
NQRKTVKCFNCGKEGHIARNCRAPRKKGCWKCGKEGHQMKDCTERQANFLGKIWPSHKGRPGNFLQSRPEPTAPPEPT
APPEESFRFGEETTTPSQKQEPIDKELYPLASLKSLFGNDPSSQ
SEQ ID NO: 779
HIV B gag episensus EG-0 Conserved, Tailored
            PIVQNLQGQMVHQAISPRTLNAWVKVVEEKAFSPEVIPMFSALSEGATPQDLNTMLNTVGGHQAAMQMLKET
INEEAAEWDRLHPVHAGPIAPGQMREPRGSDIAGTTSTLQEQIGWMTNNPPIPVGEIYKRWIILGLNKIVRMYSPTSI
LDIRQGPKEPFRDYVDRFYKTLRAEQASQEVKNWMTETLLVQNANPDCKTILKALGPAATLEEMMTACQGVGGPGHKA
RVL
SEQ ID NO: 780
HIV B gag CEN-1, Tailored
            MGSRASVLSGGKLDQWEKIRLRPGGKKRYKLKHLVWASRELERFAVNPSLLETSEGCKQILGQLQPALQTGS
EELRSLYNTIAVLYCVHQRIEVKDTKEALEKIEEEQNKCKKKAQQAAAAAADTGNSNQVSQNYPIVQNMQGQMVHQAL
SPRTLNAWVKVIEEKAFSPEVIPMFTALSEGATPADLNTMLNTIGGHQAAMQILKETINEEAAEWDRVHPVHAGPVAP
GQMREPRGSDIAGSTSTLQEQIAWMTSNPPIPVGDIYKRWIIMGLNKIVRMYSPTSILDIKQGPKEPFRDYVDRFYKT
LRAEQATQEVKNWMTETLLVQNSNPDCKTILKALGPGATLEEMMTACQGVGGPSHKARVLAEAMSQVTTPPAIMMQRG
NFKNQRKIVKCFNCGKEGHLARNCRAPRKRGCWKCGREGHQMKDCSERQANFLGKIWPSYKGRPGNFLQNRPEPTAPP
AEPTAPPAESFRFGEETATPPQKQEPIDKEMYPLTSLRSLFGNDPSQ
SEQ ID NO: 781
HIV B gag CEN-1 Conserved, Tailored
            PIVQNMQGQMVHQALSPRTLNAWVKVIEEKAFSPEVIPMFTALSEGATPADLNTMLNTIGGHQAAMQILKET
INEEAAEWDRVHPVHAGPVAPGQMREPRGSDIAGSTSTLQEQIAWMTSNPPIPVGDIYKRWIIMGLNKIVRMYSPTSI
LDIKQGPKEPFRDYVDRFYKTLRAEQATQEVKNWMTETLLVQNSNPDCKTILKALGPGATLEEMMTACQGVGGPSHKA
RVL
SEQ ID NO: 782
HIV B gag CEN-2, Tailored
            MGSRASVLSGGKLDKWEKIRLRPGGKKKYRLKHLVWASRELERYALNPGLLETAEGCRQILGQLQPALQTGS
EELKSLFNTVAVLYCVHQRIDVKDTKEALEKIEEEQNKSKKKTQQAAADTGNNSQVKVSQNYPIVQNIQGQMVHQALS
PRTLNAWVKVIEEKAFSPEVIPMFTALSEGATPHDLNTMLNTIGGHQAAMQILKETINDEAAEWDRTHPVHAGPVAPG
QMRDPRGSDIAGTTSNLQEQIGWMTHNPPIPVGDIYKRWIIMGLNKIVRMYSPVSILDIKQGPKEPFRDYVDRFYKIL
RAEQASQDVKNWMTETLLVQNSNPDCKTILKALGPGATLEEMMTACQGVGGPSHKARVLAEAMSQMTNSATIMMQKGN
FRNQRKTIKCFNCGKEGHLARNCRAPRKRGCWKCGQEGHQMKDCNERQANFLGKIWPSSKGRPGNFLQSRPESRPEPT
APPAEPTAPPAESFRFGEETATPPQKQEPIDKEMYPLASLRSLFGNDPSSK
SEQ ID NO: 783
HIV B gag CEN-2 Conserved, Tailored
            PIVQNIQGQMVHQALSPRTLNAWVKVIEEKAFSPEVIPMFTALSEGATPHDLNTMLNTIGGHQAAMQILKET
INDEAAEWDRTHPVHAGPVAPGQMRDPRGSDIAGTTSNLQEQIGWMTHNPPIPVGDIYKRWIIMGLNKIVRMYSPVSI
LDIKQGPKEPFRDYVDRFYKILRAEQASQDVKNWMTETLLVQNSNPDCKTILKALGPGATLEEMMTACQGVGGPSHKA
RVL
SEQ ID NO: 784
HIV B gag CEN-3, Tailored
            MGARASILSGGELDKWEKIRLRPGGKKQYKLKHIVWASRELERFALNPGLLETSGGCRQILEQLQPALQTGS
EELRSLYNTVAVLYCVHQRIEVKDTKEALEKIEEEQNKCKKKAQQAAAAAADTGNNSQVSQNYPIVQNIQGQMVHQAL
SPRTLNAWVKVIEEKAFSPEVIPMFTALSEGATPGDLNLMLNAVGGHQAAMQMLKDTINEEAADWDRLHPVQAGPVAP
GQLREPRGSDIAGTTSNLQEQIAWMTHNPPIPVGEIYKRWIIMGLNKIVRMYSPVSILDIKQGPKEPFRDYVDRFYRT
LRAEQASQDVKNWMTETLLIQNANPDCRTILKALGPGATLEEMMTACQGVGGPSHKARVLAEAMSQATSSATIMMQKG
NFRNQRKIVKCFNCGKEGHIAKNCRAPRKRGCWKCGREGHQMKDCSERQANFLGKIWPSYKGRPGNFLQNRPEPTAPP
AEPTAPPAESFRFGEETTTPPQKQEPTDKELYPLASLRSLFGNDPLSQ
SEQ ID NO: 785
HIV B gag CEN-3 Conserved, Tailored
            PIVQNIQGQMVHQALSPRTLNAWVKVIEEKAFSPEVIPMFTALSEGATPGDLNLMLNAVGGHQAAMQMLKDT
INEEAADWDRLHPVQAGPVAPGQLREPRGSDIAGTTSNLQEQIAWMTHNPPIPVGEIYKRWIIMGLNKIVRMYSPVSI
LDIKQGPKEPFRDYVDRFYRTLRAEQASQDVKNWMTETLLIQNANPDCRTILKALGPGATLEEMMTACQGVGGPSHKA
RVL
SEQ ID NO: 786
HIV B gag CEN-4, Tailored
            MGARASILSGGELDKWEKIRLRPGGKKKYRLKHIVWASNELERFALNPGLLETSDGCRQILGQLHPSLQTGS
EELRSLYNTVAVLYCVHQRIEIKDTKEALEKIEEEQNKCKKKAQQAAAAQQAAAGTGNNSQVSQNYPIVQNMQGQMVH
QALSPRTLNAWVKVIEEKAFSPEVIPMFTALSEGATPHDLNTMLNTIGGHQAAMQILKETINEEAAEWDRVHPVHAGP
IAPGQIREPRGSDIAGTTSNLQEQIGWMTHNPPIPVGEIYKKWIIMGLNKIVRMYSPVSILDIKQGPKEPFRDYVDRF
YKTLRAEQATQEVKNWMTETLLVQNSNPDCKTILKALGPGATLEEMMTACQGVGGPAHKARVLAEAMSQATNSAAIMM
QKGNFRNQRRTVKCFNCGKEGHIAKNCRAPRKKGCWKCGQEGHQMKDCNERQANFLGRSWPSLKGRPGNFLQNRPEPS
APPEESFKFGEETTTPPQKQEPIDKDLYPLASLRSLFGNDPSST
SEQ ID NO: 787
HIV B gag CEN-4 Conserved, Tailored
            PIVQNMQGQMVHQALSPRTLNAWVKVIEEKAFSPEVIPMFTALSEGATPHDLNTMLNTIGGHQAAMQILKET
INEEAAEWDRVHPVHAGPIAPGQIREPRGSDIAGTTSNLQEQIGWMTHNPPIPVGEIYKKWIIMGLNKIVRMYSPVSI
LDIKQGPKEPFRDYVDRFYKTLRAEQATQEVKNWMTETLLVQNSNPDCKTILKALGPGATLEEMMTACQGVGGPAHKA
RVL
SEQ ID NO: 788
HIV B gag CEN-5, Tailored
            MGSRASVLSGGKLDKWEKIRLRPGGKKKYQLKHIVWASRELERYALNPGLLETAEGCRQILEQLQPALQTGS
EELRSLYNTVAVLYCVHQKIEVKDTKEALEKVEEEQNKSKKRIQQAQQAAAADTGNSSKVSQNYPIVRNLQGQMVHQP
ISPRTLNAWVKVIEEKAFSPEVIPMFSALAEGATPQDLNLMLNAVGGHQAAMQMLKDTINEEAAEWDRMHPVHAGPVA
PGQMREPRGSDIAGTTSNLQEQIGWMTSNPPIPVGEIYKRWIIMGLNKIVRMYSPVSILDIKQGPKEPFRDYVDRFYR
TLRAEQASQDVKNWMTETLLVQNSNPDCKTILKALGPGATLEEMMTACQGVGGPSHKARVLAEAMSQVTNSTAIMMQR
GNFKNQRKIVKCFNCGKEGHIAKNCRAPRKRGCWKCGREGHQMKECTERQVNFLGKIWPSYKGRPGNFLQNRPEPTAP
PAPPEESFRFGEGTTTPSQKQGTIDKELYPLTSLRSLFGNDPS
SEQ ID NO: 789
HIV B gag CEN-5 Conserved, Tailored
            PIVRNLQGQMVHQPISPRTLNAWVKVIEEKAFSPEVIPMFSALAEGATPQDLNLMLNAVGGHQAAMQMLKDT
INEEAAEWDRMHPVHAGPVAPGQMREPRGSDIAGTTSNLQEQIGWMTSNPPIPVGEIYKRWIIMGLNKIVRMYSPVSI
LDIKQGPKEPFRDYVDRFYRTLRAEQASQDVKNWMTETLLVQNSNPDCKTILKALGPGATLEEMMTACQGVGGPSHKA
RVL
SEQ ID NO: 790
VTSSNMNNA
SEQ ID NO: 791
TSSNMNNAD
SEQ ID NO: 792
TSSNMNNADSVWLRAQEEE
SEQ ID NO: 793
TSSNMNNADCVWLRAQEEE
SEQ ID NO: 794
ARCHSLM
SEQ ID NO: 795
DEFGKLM
SEQ ID NO: 796
EPTAPPAEPTAP
SEQ ID NO: 797
PTAPPAEPTAPP
SEQ ID NO: 798
EPTAPPAEPTAPP
SEQ ID NO: 799
ARCGSLM
SEQ ID NO: 800
ARCGSPM
SEQ ID NO: 801
ARYGSLM
SEQ ID NO: 802
AYCHSLM
SEQ ID NO: 803
YRCHSLM
SEQ ID NO: 804
DEFGSLM
SEQ ID NO: 805
DEFGKLM
SEQ ID NO: 806
ARCCDEGH
SEQ ID NO: 807
ARCDEFGH
SEQ ID NO: 808
ARCCDE-GH
SEQ ID NO: 809
ARC-DEFGH
SEQ ID NO: 810
DECHJLM
SEQ ID NO: 811
DEFGJLM
```

What is claimed is:

1. An HIV-1 vaccine comprising one or more carriers and one or more population episensus antigens determined using the EpiGraph approach.

2. The vaccine of claim 1, wherein the carrier is DNA, protein, or a vector

3. The vaccine of claim 2, wherein the vector is a viral vector or a bacterial vector.

4. The vaccine of claim 3, wherein the viral vector comprises a poxvirus, adenoviruses, rubella, sendai virus, rhabdovirus, alphavirus or adeno-associated virus backbone.

5. The vaccine of claim 3, wherein the viral vector comprises a cytomegalovirus (CMV) backbone.

6. The vaccine of claim 5, wherein the CMV backbone is a human CMV (HCMV) backbone or a rhesus CMV (RhCMV) backbone.

7. The vaccine of claim 5 or 6, wherein the CMV backbone lacks the UL130-128 gene region.

8. The vaccine of any one of claims claim 5-7, wherein the CMV backbone lacks the UL82 gene encoding the tegument protein pp71.

9. The vaccine of any one of claims 1-8, wherein the population episensus antigen comprises epitopes from Gag, Pol, Nef, Env, Tat, Rev, Vpr, Vif, or Vpu.

10. The vaccine of claim 9, wherein the population episensus antigen comprises Gag epitopes.

11. The vaccine of claim 10, wherein the population episensus antigen comprises the amino acid sequence of SEQ ID NO: 697, SEQ ID NO: 698, SEQ ID NO: 699, or SEQ ID NO: 700.

12. The vaccine of any one of claims 1-11, wherein the population episensus antigen comprises epitopes from a conserved region of HIV.

13. The vaccine of claim 12, wherein in the population episensus antigen comprises epitopes from a conserved region of Gag, Pol, or Nef.

14. The vaccine of claim 13, wherein the population episensus antigen comprises epitopes from the p24 capsid protein of Gag.

15. The vaccine of any one of claims 1-14, wherein the population episensus antigen is a fusion antigen comprising two or more population episensus antigens.

16. The vaccine of claim 15, wherein the fusion antigen comprises a population episensus antigen comprising Gag epitopes and a population episensus antigen comprising Nef epitopes.

17. The vaccine of claim 15, wherein the fusion antigen comprises a population episensus antigen comprising epitopes from a conserved region of Gag and a population episensus antigen comprising epitopes from a conserved region of Nef.

18. The vaccine of claim 17, wherein the epitopes from a conserved region of Gag are epitopes from the p24 capsid protein of Gag.

19. The vaccine of any one of claims 1-18, wherein the population episensus antigen is central to the HIV-1 B clade epidemic in the United States.

20. The vaccine of claim 19, wherein the population episensus antigen comprises Gag epitopes.

21. The vaccine of claim 20, wherein the population episensus antigen comprises the amino acid sequence of SEQ ID NO: 730 or SEQ ID NO: 732.

22. The vaccine of claim 19, wherein the population episensus antigen comprises epitopes from a conserved region of Gag.

23. The vaccine of claim 22, wherein the epitopes from a conserved region of Gag are epitopes from the p24 capsid protein of Gag.

24. The vaccine of claim 23, wherein the population episensus antigen comprises the amino acid sequence of SEQ ID NO: 731 or SEQ ID NO: 733.

25. The vaccine of claim 19, wherein the population episensus antigen comprises Nef epitopes.

26. The vaccine of claim 25, wherein the population episensus antigen comprises the amino acid sequence of SEQ ID NO: 734 or SEQ ID NO: 736.

27. The vaccine of claim 19, wherein the population episensus antigen comprises epitopes from a conserved region of Nef.

28. The vaccine of claim 27, wherein the population episensus antigen comprises the amino acid sequence of SEQ ID NO: 735 or SEQ ID NO: 737

29. The vaccine of claim 19, wherein the population episensus antigen is a fusion antigen comprising two or more population episensus antigens.

30. The vaccine of claim 29, wherein the fusion antigen comprises a population episensus antigen comprising Gag epitopes and a population episensus antigen comprising Nef epitopes.

31. The vaccine of claim 30, wherein the fusion antigen comprises the amino acid sequence of SEQ ID NO: 701 or SEQ ID NO: 702.

32. The vaccine of claim 29, wherein the fusion antigen comprises a population episensus antigen comprising epitopes from a conserved region of Gag and a population episensus antigen comprising epitopes from a conserved region of Nef.

33. The vaccine of claim 32, wherein the epitopes from a conserved region of Gag are epitopes from the p24 capsid protein of Gag.

34. The vaccine of claim 19, wherein the population episensus antigen comprises Pol epitopes.

35. The vaccine of claim 34, wherein the population episensus antigen comprises the amino acid sequence of SEQ ID NO: 703, SEQ ID NO: 704, SEQ ID NO: 738 or SEQ ID NO: 740.

36. The vaccine of claim 19, wherein the population episensus antigen comprises epitopes from a conserved region of Pol.

37. The vaccine of claim 36, wherein the population episensus antigen comprises the amino acid sequence of SEQ ID NO: 739 or SEQ ID NO: 741.

38. The vaccine of any one of claims 1-18, wherein the population episensus antigen is central to the HIV-1 C clade epidemic in South Africa.

39. The vaccine of claim 38, wherein the population episensus antigen comprises Gag epitopes.

40. The vaccine of claim 39, wherein the population episensus antigen comprises the amino acid sequence of SEQ ID NO: 742 or SEQ ID NO: 744.

41. The vaccine of claim 38, wherein the population episensus antigen comprises epitopes from a conserved region of Gag.

42. The vaccine of claim 41, wherein the epitopes from a conserved region of Gag are epitopes from the p24 capsid protein of Gag.

43. The vaccine of claim 42, wherein the population episensus antigen comprises the amino acid sequence of SEQ ID NO: 743 or SEQ ID NO: 745.

44. The vaccine of claim 38, wherein the population episensus antigen comprises Nef epitopes.

45. The vaccine of claim 44, wherein the population episensus antigen comprises the amino acid sequence of SEQ ID NO: 746 or SEQ ID NO: 748.

46. The vaccine of claim 38, wherein the population episensus antigen comprises epitopes from a conserved region of Nef.

47. The vaccine of claim 46, wherein the population episensus antigen comprises the amino acid sequence of SEQ ID NO: 747 or SEQ ID NO: 749.

48. The vaccine of claim 38, wherein the population episensus antigen is a fusion antigen comprising two or more population episensus antigens.

49. The vaccine of claim 48, wherein the fusion antigen comprises a population episensus antigen comprising Gag epitopes and a population episensus antigen comprising Nef epitopes.

50. The vaccine of claim 48, wherein the fusion antigen comprises a population episensus antigen comprising epitopes from a conserved region of Gag and a population episensus antigen comprising epitopes from a conserved region of Nef.

51. The vaccine of claim 50, wherein the epitopes from a conserved region of Gag are epitopes from the p24 capsid protein of Gag.

52. The vaccine of claim 38, wherein the population episensus antigen comprises Pol epitopes.

53. The vaccine of claim 52, wherein the population episensus antigen comprises the amino acid sequence of SEQ ID NO: 750 or SEQ ID NO: 752.

54. The vaccine of claim 38, wherein the population episensus antigen comprises epitopes from a conserved region of Pol.

55. The vaccine of claim 54, wherein the population episensus antigen comprises the amino acid sequence of SEQ ID NO: 751 or SEQ ID NO: 753.

56. The vaccine of any one of claims 1-18, wherein the population episensus antigen is central to the HIV-1 2-clade regional epidemic in Thailand.

57. The vaccine of claim 56, wherein the population episensus antigen comprises Gag epitopes.

58. The vaccine of claim 56, wherein the population episensus antigen comprises epitopes from a conserved region of Gag.

59. The vaccine of claim 58, wherein the epitopes from a conserved region of Gag are epitopes from the p24 capsid protein of Gag.

60. The vaccine of claim 56, wherein the population episensus antigen comprises Nef epitopes.

61. The vaccine of claim 56, wherein the population episensus antigen comprises epitopes from a conserved region of Nef.

62. The vaccine of claim 56, wherein the population episensus antigen is a fusion antigen comprising two or more population episensus antigens.

63. The vaccine of claim 62, wherein the fusion antigen comprises a population episensus antigen comprising Gag epitopes and a population episensus antigen comprising Nef epitopes.

64. The vaccine of claim 62, wherein the fusion antigen comprises a population episensus antigen comprising epitopes from a conserved region of Gag and a population episensus antigen comprising epitopes from a conserved region of Nef.

65. The vaccine of claim 64, wherein the epitopes from a conserved region of Gag are epitopes from the p24 capsid protein of Gag.

66. The vaccine of claim 56, wherein the population episensus antigen comprises Pol epitopes.

67. The vaccine of claim 56, wherein the population episensus antigen comprises epitopes from a conserved region of Pol.

68. The vaccine of any one of claims 1-18, wherein the population episensus antigen is central to the HIV-1 M-group global set.

69. The vaccine of claim 68, wherein the population episensus antigen comprises Gag epitopes.

70. The vaccine of claim 69, wherein the population episensus antigen comprises the amino acid sequence of SEQ ID NO: 718 or SEQ ID NO: 720.

71. The vaccine of claim 68, wherein the population episensus antigen comprises epitopes from a conserved region of Gag.

72. The vaccine of claim 71, wherein the epitopes from a conserved region of Gag are epitopes from the p24 capsid protein of Gag.

73. The vaccine of claim 72, wherein the population episensus antigen comprises the amino acid sequence of SEQ ID NO: 719 or SEQ ID NO: 721.

74. The vaccine of claim 68, wherein the population episensus antigen comprises Nef epitopes.

75. The vaccine of claim 74, wherein the population episensus antigen comprises the amino acid sequence of SEQ ID NO: 722 or SEQ ID NO: 724.

76. The vaccine of claim 68, wherein the population episensus antigen comprises epitopes from a conserved region of Nef.

77. The vaccine of claim 76, wherein the population episensus antigen comprises the amino acid sequence of SEQ ID NO: 723 or SEQ ID NO: 725.

78. The vaccine of claim 68, wherein the population episensus antigen is a fusion antigen comprising two or more population episensus antigens.

79. The vaccine of claim 78, wherein the fusion antigen comprises a population episensus antigen comprising Gag epitopes and a population episensus antigen comprising Nef epitopes.

80. The vaccine of claim 79, wherein the fusion antigen comprises the amino acid sequence of SEQ ID NO: 705 or SEQ ID NO: 707.

81. The vaccine of claim 78, wherein the fusion antigen comprises a population episensus antigen comprising epitopes from a conserved region of Gag and a population episensus antigen comprising epitopes from a conserved region of Nef.

82. The vaccine of claim 81, wherein the epitopes from a conserved region of Gag are epitopes from the p24 capsid protein of Gag.

83. The vaccine of claim 82, wherein the fusion antigen comprises the amino acid sequence of SEQ ID NO: 706 or SEQ ID NO: 708.

84. The vaccine of claim 68, wherein the population episensus antigen comprises Pol epitopes.

85. The vaccine of claim 84, wherein the population episensus antigen comprises the amino acid sequence of SEQ ID NO: 709, SEQ ID NO: 711, SEQ ID NO: 726, or SEQ ID NO: 728.

86. The vaccine of claim 68, wherein the population episensus antigen comprises epitopes from a conserved region of Pol.

87. The vaccine of claim 86, wherein the population episensus antigen comprises the amino acid sequence of SEQ ID NO: 710, SEQ ID NO: 712, SEQ ID NO: 727, or SEQ ID NO: 729.

88. The vaccine of any one of claims 1-87, wherein the vaccine is a prophylactic vaccine.

89. The vaccine of any one of claims 1-87, wherein the vaccine is a therapeutic vaccine.

90. A polypeptide comprising one or more HIV-1 population episensus antigens determined using the EpiGraph approach, wherein the polypeptide comprises an amino acid sequence selected from the group consisting of: SEQ ID NOs: 697-712 and SEQ ID NOs:717-753.

91. A method of treating HIV-1 in a subject comprising administering an effective amount of the vaccine of any one of claims 1-87 to the subject in need thereof.

92. A method of protecting from an HIV-1 infection in a subject comprising administering an effective amount of the vaccine of any one of claims 1-87 to the subject in need thereof.

93. An HIV-1 vaccine comprising one or more carriers, a population episensus antigen determined using the EpiGraph approach, and one or more tailored antigens.

94. The vaccine of claim 93, wherein the carrier is DNA, protein, or a vector

95. The vaccine of claim 94, wherein the vector is a bacterial vector or a viral vector.

96. The vaccine of claim 95, wherein the viral vector comprises a poxvirus, adenoviruses, rubella, sendai virus, rhabdovirus, alphavirus or adeno-associated virus backbone.

97. The vaccine of claim 95, wherein the viral vector comprises a CMV backbone.

98. The vaccine of claim 97, wherein the CMV backbone is a HCMV backbone or a RhCMV backbone.

99. The vaccine of claim 97 or claim 98, wherein the CMV backbone lacks the UL130-128 gene region.

100. The vaccine of any one of claims 97-99, wherein the CMV backbone lacks the UL82 gene encoding the tegument protein pp71.

101. The vaccine of any one of claims 93-100, further comprising a second tailored antigen.

102. The vaccine of claim 101, further comprising a third tailored antigen.

103. The vaccine of any one of claims 97-102, wherein the population episensus antigen comprises Gag epitopes.

104. The vaccine of claim 103, wherein the population episensus antigen comprises the amino acid sequence of SEQ ID NO: 691.

105. The vaccine of claim 103, wherein the population episensus antigen comprises the amino acid sequence of an inactivated Gag protein, wherein the amino acid sequence of the inactivated Gag protein was inactivated by eliminating a myristoylation sequence in the N-terminus of the Gag protein.

106. The vaccine of any one of claims 93-105, wherein the tailored antigen comprises Gag epitopes.

107. The vaccine of claim 106, wherein the tailored antigen comprises the amino acid sequence of SEQ ID NO: 692, SEQ ID NO: 693, SEQ ID NO: 694, SEQ ID NO: 695 or SEQ ID NO: 696.

108. The vaccine of claim 107, wherein the first tailored antigen and the second tailored antigen comprise two of the amino acid sequences of SEQ ID NO: 692, SEQ ID NO: 693, SEQ ID NO: 694, SEQ ID NO: 695 and SEQ ID NO: 696.

109. The vaccine of claim 108, wherein the first tailored antigen, the second tailored antigen, and the third tailored antigen comprise three of the amino acid sequences of SEQ ID NO: 692, SEQ ID NO: 693, SEQ ID NO: 694, SEQ ID NO: 695 and SEQ ID NO: 696.

110. The vaccine of claim 106, wherein the tailored antigen comprises the amino acid sequence of an inactivated Gag protein, wherein the amino acid sequence of the inactivated Gag protein was inactivated by eliminating a myristoylation sequence in the N-terminus of the Gag protein.

111. The vaccine of claim 93-102, wherein the population episensus antigen is central to the HIV-1 M-group global set.

112. The vaccine of claim 111, wherein the population episensus antigen and the tailored antigen comprise Gag epitopes.

113. The vaccine of claim 111, wherein the population episensus antigen and the tailored antigen sequence comprise epitopes form a conserved region of Gag.

114. The vaccine of claim 113, wherein the epitopes from a conserved region of Gag are epitopes form the p24 capsid protein of Gag.

115. The vaccine of any one of claims 112-114, wherein the population episensus antigen comprises the amino acid sequence of SEQ ID NO: 754 or SEQ ID NO: 755.

116. The vaccine of claim 115, wherein the tailored antigen comprises an amino acid sequence selected from the group consisting of: SEQ ID NOs: 756-765.

117. The vaccine of claim 116, wherein the first tailored antigen and the second tailored antigen comprise two of the amino acid sequences selected from the group consisting of: SEQ ID NOs: 756-765.

118. The vaccine of claim 117, wherein the first tailored antigen, the second tailored antigen, and the third tailored antigen comprise three of the amino acid sequences selected from the group consisting of: SEQ ID NOs: 756-765.

119. The vaccine of claim 93-102, wherein the population episensus antigen is central to the HIV-1 C clade epidemic in South Africa.

120. The vaccine of claim 119, wherein the population episensus antigen and the tailored antigen comprise Gag epitopes.

121. The vaccine of claim 119, wherein the population episensus antigen and the tailored antigen sequence comprise epitopes form a conserved region of Gag.

122. The vaccine of claim 121, wherein the epitopes from a conserved region of Gag are epitopes form the p24 capsid protein of Gag.

123. The vaccine of any one of claims 119-122, wherein the population episensus antigen comprises the amino acid sequence of SEQ ID NO: 766 or SEQ ID NO: 767.

124. The vaccine of claim 123, wherein the tailored antigen comprises an amino acid sequence selected from the group consisting of: SEQ ID NOs: 768-777.

125. The vaccine of claim 124, wherein the first tailored antigen and the second tailored antigen comprise two of the amino acid sequences selected from the group consisting of: SEQ ID NOs: 768-777.

126. The vaccine of claim 125, wherein the first tailored antigen, the second tailored antigen, and the third tailored antigen comprise three of the amino acid sequences selected from the group consisting of: SEQ ID NOs: 768-777.

127. The vaccine of claim 93-102, wherein the population episensus antigen is central to the HIV-1 B clade epidemic in South Africa.

128. The vaccine of claim 127, wherein the population episensus antigen and the tailored antigen comprise Gag epitopes.

129. The vaccine of claim 127, wherein the population episensus antigen and the tailored antigen sequence comprise epitopes form a conserved region of Gag.

130. The vaccine of claim 129, wherein the epitopes from a conserved region of Gag are epitopes form the p24 capsid protein of Gag.

131. The vaccine of any one of claims 127-130, wherein the population episensus antigen comprises the amino acid sequence of SEQ ID NO: 778 or SEQ ID NO: 779.

132. The vaccine of claim 131, wherein the tailored antigen comprises an amino acid sequence selected from the group consisting of: SEQ ID NO: 780-789.

133. The vaccine of claim 132, wherein the first tailored antigen and the second tailored antigen comprise two of the amino acid sequences selected from the group consisting of: SEQ ID NO: 780-789.

134. The vaccine of claim 133, wherein the first tailored antigen, the second tailored antigen, and the third tailored antigen comprise three of the amino acid sequences selected from the group consisting of: SEQ ID NO: 780-789.

135. The vaccine of any one of claims 93-102, wherein the population episensus antigen and the tailored antigen comprise Pol or Nef epitopes.

136. The vaccine of any one of claims 93-135, further comprising a HCMV vector comprising a HCMV backbone and a tailored antigen selected to be a best match natural HIV-1 strain.

137. The vaccine of any one of claims 93-136, further comprising a HCMV vector comprising a HCMV backbone and a tailored antigen selected to be a best match different (and distant) HIV-1 strain.

138. The vaccine of any one of claims 93-137, wherein the vaccine is a therapeutic vaccine.

139. An HIV-1 vaccine comprising one or more carriers and one or more population episensus antigens or tailored antigens, wherein the population episensus antigen and the tailored antigen are determined using the EpiGraph method.

140. The vaccine of claim 139, wherein the carrier is DNA, protein, or a vector.

141. The vaccine of claim 140, wherein the vector is a viral vector or a bacterial vector.

142. The vaccine of claim 141, wherein the viral vector comprises a poxvirus, adenoviruses, rubella, sendai virus, rhabdovirus, alphavirus or adeno-associated virus backbone.

143. The vaccine of claim 141, wherein the viral vector comprises a cytomegalovirus (CMV) backbone.

144. The vaccine of claim 143, wherein the CMV backbone is a human CMV (HCMV) backbone or a rhesus CMV (RhCMV) backbone.

145. The vaccine of claim 143 or 144, wherein the CMV backbone lacks the UL130-128 gene region.

146. The vaccine of any one of claims 143-145, wherein the CMV backbone lacks the UL82 gene encoding the tegument protein pp71.

147. The vaccine of any one of claims 139-146, wherein the population episensus antigen or the tailored antigen comprises an amino acid sequence selected from the group consisting of:
SEQ ID NOs: 691-696 and SEQ ID NOs: 754-789.

148. The vaccine of claim 147, wherein the vaccine further comprises a second population episensus antigen or tailored antigen, and wherein the second population episensus antigen or tailored antigen comprises an amino acid sequence selected from the group consisting of: SEQ ID NOs: 691-696 and SEQ ID NOs: 754-789.

149. The vaccine of claim 148, wherein the vaccine further comprises a third population episensus antigen or tailored antigen, and wherein the third population episensus antigen or tailored antigen comprises an amino acid sequence selected from the group consisting of: SEQ ID NOs: 691-696 and SEQ ID NOs: 754-789.

150. The vaccine of any one of claims 139-149, wherein the vaccine is a therapeutic vaccine.

151. A polypeptide comprising one or more HIV-1 population episensus antigens or HIV-1 tailored antigens, wherein the polypeptide comprises an amino acid sequence selected from the group consisting of: SEQ ID NOs: 691-696 and SEQ ID NOs: 754-789.

152. A method of treating HIV-1 in a subject comprising administering an effective amount of the vaccine of any one of claims 93-150 to the subject in need thereof.

153. A method of designing and producing an HIV-1 vaccine for a subject comprising:
(a) designing EpiGraph vaccine antigens to optimally cover the diversity within a geographic area using a vaccine antigen amino acid sequence generated using the EpiGraph method of antigen amino acid sequence selection; and,
(b) producing said designed EpiGraph vaccine antigens.

154. A method of designing and producing an HIV-1 vaccine for a subject comprising:
(a) determining the amino acid sequence of HIV-1 viruses in an individual;
(b) designing EpiGraph vaccine antigens to optimally cover the diversity within a geographic area using a vaccine antigen amino acid sequence generated using the EpiGraph method of antigen amino acid sequence selection;
(c) producing said designed EpiGraph vaccine antigens; and
(d) inserting the Epigraph vaccine antigens into a vector.

155. A method of inducing an effector memory T cell response comprising:
(a) designing one or more EpiGraph vaccine antigens;
(b) producing a vaccine comprising the one or more EpiGraph vaccine antigens and a vector; and
(c) administering the vaccine to a subject in need thereof.

156. The method of any one of claims 153-155, wherein the EpiGraph vaccine antigen comprises an amino acid sequence selected from the group consisting of: SEQ ID NOs: 691-712 and SEQ ID NOs: 717-789.

The application's sequence listing, which the Patent Office published only in electronic form, follows.

SEQUENCE LISTING (809 sequences)

SEQ ID NO: 1 - protein, 500 aa, Human immunodeficiency virus
MGARASVLSGGELDRWEKIRLRPGGKKKYKLKHIVWASRELERFAVNPGLLETSEGCRQILGQLQPSLQTGSEELRSLYNTVATLYCVHQRIEIKDTKEALDKIEEEQNKSKKKAQQAAADTGHSNQVSQNYPIVQNIQGQMVHQAISPRTLNAWVKVVEEKAFSPEVIPMFSALSEGATPQDLNTMLNTVGGHQAAMQMLKETINEEAAEWDRVHPVHAGPIAPGQMREPRGSDIAGTTSTLQEQIGWMTNNPPIPVGEIYKRWIILGLNKIVRMYSPTSILDIRQGPKEPFRDYVDRFYKTLRAEQASQEVKNWMTETLLVQNANPDCKTILKALGPAATLEEMMTACQGVGGPGHKARVLAEAMSQVTNSATIMMQRGNFRNQRKIVKCFNCGKEGHTARNCRAPRKKGCWKCGKEGHQMKDCTERQANFLGKIWPSYKGRPGNFLQSRPEPTAPPEESFRSGVETTTPPQKQEPIDKELYPLTSLRSLFGNDPSSQ

SEQ ID NO: 2 - protein, 503 aa, Human immunodeficiency virus
  misc_feature (7)..(7): Xaa can be any naturally occurring amino acid
  misc_feature (96)..(96): Xaa can be any naturally occurring amino acid
  misc_feature (372)..(372): Xaa can be any naturally occurring amino acid
  misc_feature (377)..(377): Xaa can be any naturally occurring amino acid
  misc_feature (408)..(408): Xaa can be any naturally occurring amino acid
MGARASXLSGGELDKWEKIRLRPGGKKKYRLKHLVWASRELERFAVNPGLLETAEGCRKIIAQLQPSLQTGSEELKSLFNTVATIYCVHQRIEVKXTKEALEKVEEEQNKSKKKAQQAEAGTGNNSQVSQNYPIVQNLQGQMVHQALSPRTLNAWVKVIEEKAFSPEVIPMFSALSEGATPQDLNTMLNTVGGHQAAMQMLKETINEEAAEWDRLHPVHAGPIAPGQMREPRGSDIAGTTSTLQEQIAWMTNNPPVPVGEIYKRWIILGLNKIVRMYSPVSILDIKQGPKEPFRDYVDRFYKTLRAEQASQEVKHWMTETLLVQNANPDCKTILKALGPAATLEEMMTACQGVGGPGHKARVLAEAMSQINXATVMXQKGDYRNQRRTVKCFNCGKEGHIAKNCRAPXKKGCWKCGREGHQMKDCTERQANFLGKIWPSHKGRPGNFLQSRPEPTAPPAPPEEIFRFGEETAPSQKQERTDRDKELYPSAALRSLFGNDPLSQ

SEQ ID NO: 3 - protein, 500 aa, Human immunodeficiency virus
  misc_feature (37)..(37): Xaa can be any naturally occurring amino acid
  misc_feature (100)..(100): Xaa can be any naturally occurring amino acid
  misc_feature (104)..(104): Xaa can be any naturally occurring amino acid
  misc_feature (123)..(123): Xaa can be any naturally occurring amino acid
  misc_feature (158)..(158): Xaa can be any naturally occurring amino acid
  misc_feature (164)..(164): Xaa can be any naturally occurring amino acid
  misc_feature (247)..(247): Xaa can be any naturally occurring amino acid
  misc_feature (268)..(268): Xaa can be any naturally occurring amino acid
  misc_feature (290)..(290): Xaa can be any naturally occurring amino acid
  misc_feature (298)..(298): Xaa can be any naturally occurring amino acid
  misc_feature (398)..(398): Xaa can be any naturally occurring amino acid
  misc_feature (427)..(427): Xaa can be any naturally occurring amino acid
MGARASILSGGKLDQWEKIRLRPGGKKKYRLKHLVWXSRELERFAVNPGLLETTEGCKQILEQLQPSLQTGSEELRSLYNTIATLYCVHKNIDVADTKEXLEKXEEEQNKSKKKAQQAAADTXNNSQVSHNYPIVQNLQGQMVHQAISPRTLNAWVKXVEEKAXSPEVIPMFSALSEGATPQDLNTMLNTVGGHQAAMQMLKETINDEAAEWDRLHPPQAGPIAPGQIREPRGSDIAGTTSTLQEQXTWMTNNPPIPVGEIYKRWIIXGLNKIVRMYSPSSILDIRQGPXEPFRDYVXRFYKTLRAEQASQDVKNWMTETLLVQNANPDCKTILKALGPGATLEEMMTACQGVGGPSHKARILAEAMSQVTNSATIMMQRGNFRNQRKIVKCFNCGKXGHIARNCKAPRKKGCWKCGKEGHQMKDCXERQANFLGKIWPSYKGRPGNFLQSRPEPTAPPAESFRFGEETTTPPQKQEQTDKETYPLASLRSLFGNDPSSQ

SEQ ID NO: 4 - protein, 502 aa, Human immunodeficiency virus
MGARASILSGGELDRWEKIRLRPGGKKKYKLKHLVWASRELERFAVNPGLLETSEGCRQILAQLQPALQTGPEELKSVYNTVATLYCVHQRIDVKDTREALDKIEEEQNKSKKKAQQAAADTGNSRNSSQVSQNYPIVQNLQGQMVHQAISPRTLNAWVKVVEEKAFSPEVIPMFSALSEGATPQDLNTMLNTVGGHQAAMQMLKETINEEAAEWDRLHPVHAGPVAPGQMREPRGSDIAGTTSTLQEQIGWMTNNPPIPVGEIYKRWIIMGLNKIVRMYSPTSILDVRQGPKEPFRDYVDRFYKTLRAEQASQDVKNWMTETLLVQNANPDCKTILKALGPAATLEEMMTACQGVGGPSHKARVLAEAMSQANSTTIMMQKGNFRNQRKTVKCFNCGKEGHIARNCRAPRKKGCWKCGREGHQMKDCTERQANFLGKIWPSHEGRPGNFLQSRPEPTAPPEESFRFGEGTTTPSQKQEPIDKELYPLTSLKSLFGNDPSSQ

SEQ ID NO: 5 - protein, 499 aa, Human immunodeficiency virus
  misc_feature (64)..(64): Xaa can be any naturally occurring amino acid
  misc_feature (114)..(114): Xaa can be any naturally occurring amino acid
  misc_feature (124)..(124): Xaa can be any naturally occurring amino acid
  misc_feature (167)..(167): Xaa can be any naturally occurring amino acid
  misc_feature (175)..(175): Xaa can be any naturally occurring amino acid
  misc_feature (255)..(255): Xaa can be any naturally occurring amino acid
  misc_feature (351)..(351): Xaa can be any naturally occurring amino acid
  misc_feature (388)..(388): Xaa can be any naturally occurring amino acid
  misc_feature (391)..(391): Xaa can be any naturally occurring amino acid
  misc_feature (436)..(436): Xaa can be any naturally occurring amino acid
MGARASILSGGKLDRWEKIRLRPGGKKQYKLKHLVWASRELERFAVNPGLLETSDGCRRILGQXQPSLQTGSEELKSLYNTVATLYCVHQGIDIKDTKEALDKIEEEQNKCKKXAQQAAADTGXSSQVSQNYPIVQNLQGQMVHQAISPRTLNAWVKVIEEKAFSPXVIPMFSAXSEGATPQDLNTMLNTVGGHQAAMQMLKDTINEEAAEWDRLHPVHAGPVAPGQMREPRGSDIAGTTSTLQEQIGWMTNNPXIPVGEIYKRWIILGLNKIVRMYSPVSILDIRQGPKEPFRDYVDRFYKTLRAEQASQDVKNWMTETLLIQNANPDCKTILKALGPAATLEEMMTACXGVGGPGHKARVLAEAMCQANSNTIMMQRGNFKSQRKXVKXFNCGREGHIAKNCRAPRKKGCWKCGKEGHQMKDCTERQVNFLGKXWPSNKGRPGNFLQSRPEPTAPPAESFRFGEETTAPPQKQEPIDKDLYPLASLKSLFGSDPSSQ

SEQ ID NO: 6 - protein, 502 aa, Human immunodeficiency virus
  misc_feature (43)..(43): Xaa can be any naturally occurring amino acid
  misc_feature (67)..(67): Xaa can be any naturally occurring amino acid
  misc_feature (174)..(174): Xaa can be any naturally occurring amino acid
  misc_feature (238)..(238): Xaa can be any naturally occurring amino acid
  misc_feature (324)..(324): Xaa can be any naturally occurring amino acid
  misc_feature (335)..(335): Xaa can be any naturally occurring amino acid
  misc_feature (340)..(340): Xaa can be any naturally occurring amino acid
  misc_feature (395)..(395): Xaa can be any naturally occurring amino acid
  misc_feature (424)..(424): Xaa can be any naturally occurring amino acid
  misc_feature (489)..(489): Xaa can be any naturally occurring amino acid
MGARASILSGGQLDRWEKIRLRPGGKKKYQLKHLVWASRELEXFAVNPGLLETSEGCRQILGQLHPXLHTGSEELKSVYNTVATLYCVHQRIDIKDTKEALEKIEEEQNKIKKKVQQAAADTGNSSQVSQNYPIVQNIQGQMVHQPISPRTLNAWVKVVEEKAFSPEVIPMFAXLSEGATPQDLNTMLNTVGGHQAAMQMLKETINEEAAEWDRLHPVPAGPIAPGQMRDPRGSDIAXTTSTLQEQIGWMTSNPPIPVGEIYKKWIIMGLNKIVRMYSPTSILDIRQGPKEPFRDYVDRFYKTLRAEQASQEVKNWMTETLLVXNANPDCKTILXALGPXATLEEMMTACQGVGGPGHKARVLAEAMSQATNAGAIMMQKGNFRNQRKSIKCFNXGKEGHLARNCKAPRKKGCWKCGKEGHQMXDCNERQVNFLGKIWPSHKGRPGNFLQSRPEPTAPPEESFRFGEETTTPSQKQETIDRDKELYPLXSLRSLFGNDPSSQ

SEQ ID NO: 7 - protein, 500 aa, Human immunodeficiency virus
  misc_feature (61)..(61): Xaa can be any naturally occurring amino acid
  misc_feature (191)..(191): Xaa can be any naturally occurring amino acid
  misc_feature (197)..(197): Xaa can be any naturally occurring amino acid
  misc_feature (216)..(216): Xaa can be any naturally occurring amino acid
  misc_feature (223)..(223): Xaa can be any naturally occurring amino acid
  misc_feature (246)..(246): Xaa can be any naturally occurring amino acid
  misc_feature (295)..(295): Xaa can be any naturally occurring amino acid
MGARASVLSGGELDKWEKIRLRPGGKKKYRLKHIVWASRELERFAVNPGLLETSGGCRQIXEQIQPSLKTGSEELRSLFNTVAVLYCVHQRIDVKDTKEALDKIEEEQNKSKKKAQPAAADTGNNSQVSQNYPIVQNIQGQMVHQPISPRTLNAWVKVIEERAFSPEVIPMFSALSEGATPSDLNIMLNTXGGHQAXMQMLKETINEEAAEWDRLXPVHAGPXAPGQMREPRGSDIAGTTSTLQEXIGWMTGNPAIPVGDIYKRWIILGLNKIVRMYSPTSILDIRQGPKEPFRXYVDRFYKTLRAEQASQDVKNWMTETLLVQNANPDCKTILKALGPAATLEEMMTACQGVGGPSHKARVLAEAMSQATASTNIMMQRGNFRNQRKTVKCFNCGKEGHIAKNCRAPRKKGCWKCGKEGHQMKDCTERQANFLGKIWPSHKGRPGNFLQSRPEPTAPPAESFGFGEETTTPPQKQEPIDKELYPLASLKSLFGSDPASQ

SEQ ID NO: 8 - protein, 507 aa, Human immunodeficiency virus
  misc_feature (118)..(118): Xaa can be any naturally occurring amino acid
  misc_feature (127)..(127): Xaa can be any naturally occurring amino acid
  misc_feature (140)..(140): Xaa can be any naturally occurring amino acid
  misc_feature (149)..(149): Xaa can be any naturally occurring amino acid
  misc_feature (195)..(195): Xaa can be any naturally occurring amino acid
  misc_feature (298)..(298): Xaa can be any naturally occurring amino acid
  misc_feature (372)..(372): Xaa can be any naturally occurring amino acid
  misc_feature (465)..(465): Xaa can be any naturally occurring amino acid
  misc_feature (472)..(472): Xaa can be any naturally occurring amino acid
MGARASVLSGGELDRWEKIRLRPGGKKKYKLKHIVWASRELERFAVNPGLLETSEGCRQILGQLQPSLQTGSEELKSLYNTVATLYCVHQRIEIKDTKEALDKIEEEQNKSKKKAQQXAADTGSSSXVSPVSQNYPIVQXMQGQMVHQXISPRTLNAWVKVIEEKAFSPEVIPMFSALSEGATPQDLNTMLNTVXGHQAAMQMLKETINEEAAEWDRVHPVHAGPIAPGQMREPRGSDIAGTTSTLQEQIGWMTNNPPIPVGEIYKRWIILGLNKIVRMYSPVSILDIRQGPKEPFRXYVDRFYKTLRAEQATQEVKNWMTETLLVQNANPDCKTILKALGPAATLEEMMTACQGVGGPGHKARVLAEAMSXVTNSANIMMQRGNFRNQRKTVKCFNCGKEGHIARNCRAPRKKGCWKCGKEGHQMKDCTERQVNFLGKIWPSHKGRPGNFFQSRLESRPEPTAXPEESFRXGEETTTPPQKQEPIDKELYPLASLRSLFGNDPSSQ

SEQ ID NO: 9 - protein, 502 aa, Human immunodeficiency virus
  misc_feature (485)..(485): Xaa can be any naturally occurring amino acid
MGARASVLSGGELDRWEKIRLRPGGKKKYRLKHVVWASRELERFALNPGLLETSEGCRQIMEQIQPALQTGSEELRSLYNTVAVLYCVHHKIDVKDTKEALDKIEEEQNKSKKKAQQAAAAADTGNSGKVSQNFPIVQNLQGQMVHQAISPRTLNAWVKVVEEKAFSPEVIPMFSALSEGATPQDLNTMLNTVGGHQAAMQMLKETINEEAAEWDRLHPVHAGPIAPGQMREPRGSDIAGTTSTLQEQIGWMTNNPPIPVGEIYKRWIILGLNKIVRMYSPTSILDIRQGPKEPFRDYVDRFYKTLRAEQASQEVKNWMTETLLVQNANPDCKTILKALGPAATLEEMMTACQGVGGPGHKARVLAEAMSQATNATTIMMQRGNFRNQRRTVKCFNCGKEGHIAKNCRAPRKKGCWKCGKEGHQMKDCTERQVNFLGKIWPSHKGRPGNFLQSRPEPTAPPAESFRFGEETTTPPQKQEPTDKDXYPLASLRSLFGNDPSSQ

SEQ ID NO: 10 - protein, 502 aa, Human immunodeficiency virus
  misc_feature (163)..(163): Xaa can be any naturally occurring amino acid
MGARASVLSGGKLDRWEKIRLRPGGKKKYKLKHIVWASRELERFAVNPGLLETSGGCRQILEQLQPALRTGSEELKSLYNTVATLYCVHQQIDVKDTKEALDRIEAEQNESKKKTQQAAADPGNSSQVSQNYPIVQNIQGQMVHQAISPRTLNAWVKVVEEKXFSPEVIPMFSALSEGATPQDLNTMLNTVGGHQAAMQMLKETINEEAAEWDRTHPVHAGPIAPGQMREPRGSDIAGTTSTLQEQIGWMTNNPPIPVGEIYKRWIILGLNKIVRMYSPTSILDIRQGPKEPFRDYVDRFYKTLRAEQASQEVKNWMTETLLVQNANPDCKTILKALGPAATLEEMMTACQGVGGPGHKARVLAEAMSQVTNSATIMMQRGNFRNNKKTVKCFNCGKEGHIARNCRAPRKKGCWKCGKEGHQMKDCTERQVNFLGKIWPSHKGRPGNFLQSRLEPSRPEPTAPPEESFRFGEETPTPPQKQEPIDKELYPSASLRSLFGNDP

SEQ ID NO: 11 - protein, 507 aa, Human immunodeficiency virus
  misc_feature (8)..(8): Xaa can be any naturally occurring amino acid
MGARASVXSGGELDRWEKIRLRPGGKKRYKLKHIVWASRELERFAVNPGLLETSEGCRQILAQLQPSLQTGSEELKSLYNTVATLYCVHQRIDIKDTKEALDKIEEEQNKSKKKAQQAAADTGNSSQVSQNYPIVQNLQGQMVHQSLSPRTLNAWVKVVEEKAFSPEVIPMFSALSEGATPQDLNTMLNTVGGHQAAMQMLKETINEEAAEWDRLHPVHAGPIAPGQMREPRGSDIAGTTSTLQEQIGWMTHNPPIPVGEIYKRWIILGLNKIVRMYSPASILDIRQGPKEPFRDYVDRFYKTLRAEQASQEVKNWMTETLLVQNANPDCKTILKALGPGATLEDMMTACQGVGGPGHKARVLAEAMSQVTNSANVMMQRGNFRNQRKPIKCFNCGKEGHIAKNCRAPRKKGCWKCGKEGHQMKDCTERQANFLGRVWPSHKGRPGNFLQSRLEPTAPPEPTAPPEESFRFGGETTTPSQRQEPIDKELYPPLASLKSLFGNDPSSQ

SEQ ID NO: 12 - protein, 502 aa, Human immunodeficiency virus
MGARASILTGGQLDKWEKIRLRPGGKKKYQLKHIVWASRELERFAVNPGLLETAGGCRQILKQLQPSLQTGSEELKSLYNTVAVLYCVHQQIEIKDTKEALDKIEEEQNKSKKQTQQAAAAAGTGNSSQVSQNYPIVQNLQGQMVHQAIAPRTLNAWVKVVEEKAFSPEVIPMFAALSEGATPQDLNTMLNTVGGHQAAMQMLKETINEEAAEWDRLHPVHAGPIAPGQMREPRGSDIAGTTSTLQEQIAWMTNNPPIPVGDIYKKWIIIGLNKIVRMYSPASILDIKQGPKEPFRDYVDRFYKTLRAEQASQEVKNWMTETLLVQNANPDCKTILKALGPAATLEEMMTACQGVGGPGHKASVLAEAMSQVTNSATIMIQKGNFRNQRKTIKCFNCGKEGHIARNCRAPRKRGCWKCGKEGHQMKECTERQANFLGKIWPSHKGRPGNFLQSRPEPSAPPAESFRFGEETATPSQKQEQTDKELYPLASLRSLFGNDPSSQ

SEQ ID NO: 13 - protein, 499 aa, Human immunodeficiency virus
MGARASVLSGGELDKWEKIRLRPGGKKKYKLKHIVWASRELERFAVNPGLLETSEGCRQILGQLHPSLPTGSEELRSLYNTVATLYCVHQKIDVKDTKEAVEKVEEEQNKSKKKAQQAAADTGNNSQVSQNYPIVQNLQGQMVHQAISPRTLNAWVKVIEEKAFSPEVIPMFTALSEGATPQDLNTMLNTVGGHQAAMQMLKETINEEAAEWDRLHPVQAGPVAPGQLREPRGSDIAGTTSTLQEQIAWMTHNPPVPVGEIYKRWIILGLNKIVRMYSPVSILDIRQGPKEPFRDYVDRFYKTLRAEQASQEVKNWMTETLLVQNANPDCKNILKALGPAATLEEMMTACQGVGGPGHKARVLAEAMSQVNSTTIMMQRGNFRNQRKTIKCFNCGKEGHLARNCRAPRKKGCWKCGKEGHQMKDCTERQANFLGKIWPSYKGRPGNFLQSRPEPTAPPAESFGFGEEIVTPSQKQEPKDKDLSPLASLRSLFGNDPSSQ

SEQ ID NO: 14 - protein, 500 aa, Human immunodeficiency virus
MGARASVLSGGELDKWEKIRLRPGGKKQYKLKHIVWASRELERFALNPGLLETSEGCRQILGQLQPSLQTGSEELRSLYNTVATLYCVHQRIDVKDTKEALEKIEEEQNKSKKKAQQAAANTGNNSQVSQNYPIVQNMQGQMVHQAISPRTLNAWVKVVEEKAFSPEVIPMFSALSEGATPQDLNTMLNTVGGHQAAMQMLKETINEEAAEWDRLHPVHAGPIAPGQMREPRGSDIAGTTSTLQEQIGWMTNNPPIPVGEIYKRWIILGLNKIVRMYSPTSILDIRQGPKEPFRDYVDRFYKTLRAEQASQEVKNWMTETLLVQNSNPDCKTILKALGPAATLEEMMTACQGVGGPGHKARVLAEAMSQVTSSNTIMMQRGNFRNQRKSVKCFNCGKEGHIARNCKAPRKKGCWKCGREGHQMKDCTERQANFLGKIWPSHKGRPGNFLQSRPEPTAPPEESFRFGEETTTPSQKQEPRDKELYPLASLRSLFGNDPSSQ

SEQ ID NO: 15 - protein, 498 aa, Human immunodeficiency virus
MGARASVLSGGELDRWEKIRLRPGGKKKYKLKHIVWASRELERFAVNPSLLETSEGCRQILGQLQPALQTGSEEIKSLYNTVATLYCVHQRIEIKDTKEALDKIEEEQNKSKKKAQQSAADTGNSSQVSQNYPIVQNSQGQMIHQAISPRTLNAWVKVVEEKAFSPEVIPMFSALSEGATPHDLNTMLNTVGGHQAAMQMLKETINEEAAEWDRLHPVQAGPIAPGQIREPRGSDIAGTTSTLQEQIAWMTNNPPIPVGEIYKRWIILGLNKIVRMYSPSSILDIRQGPKEPFRDYVDRFYKTLRAEQASQEVKNWMTETLLVQNANPDCKTILKALGPAATLEEMMTACQGVGGPGHKARVLAEAMSQVTNSATIMMQRGNLRNQRKSVKCFNCGKEGHIARNCRAPRKKGCWKCGKEGHQMKDCTERQANFLGKIWPSHKGRPGNFLQNRTEPTAPPEESFRFGEETTTPSQKQTDKELYPLASLRSLFGNDPSSQ

SEQ ID NO: 16 - protein, 500 aa, Human immunodeficiency virus
MGARASVLSGGELDKWERIRLRPGGKKKYRLKHVVWASRELERFAVNPGLLETTEGCRQILGQLQPALQTGSEELRSLYNTIAVLYCVHQRIEVKDTKEALDKIEEEQNKSKKKAQQAAADTGNSSQVSQNYPIVQNLQGQMVHQAISPRTLNAWVKVVEEKAFSPEVIPMFSALSEGATPQDLNTMLNTVGGHQAAMQMLKETINEEAAEWDRVHPVHAGPVAPGQMREPRGSDIAGTTSTLQEQIGWMTNNPPIPVGEIYKRWIILGLNKIVRMYSPTSILDIRQGPKEPFRDYVDRFYKTLRAEQASQEVKNWMTETLLVQNANPDCKTILKALGPAATLEEMMTACQGVGGPGHKARVLAEAMSQVTNPATIMMQRGNFRNQRKTVKCFNCGKEGHIAKNCRAPRKKGCWKCGKEGHQMKDCTERQANFLGKIWPSHKGRPGNFLQSRPEPTAPPEESFRFGEETTTPSQQKEQIDKELYPLASLKSLFGNDPSSQ

SEQ ID NO: 17 - protein, 503 aa, Human immunodeficiency virus
MGARASVLSGGELDRWEKIRLRPGGKKKYQLKHIVWASRELERFAVNPGLLETSEGCRQILGQLQPSLQTGSEELKSLFNTVATLYCVHQKIDVKDTKEALDRIEEEQNKSKIKAQQAAADTGSSSQVSQNYPIVQNLQGQMVHQAISPRTLNAWVKVVEEKAFSPEVIPMFSALAEGATPQDLNTMLNTVGGHQAAMQMLKETINEEAAEWDRLHPIHAGPIAPGQMREPRGSDIAGTTSTLQEQIGWMTNNPPIPVGEIYKRWIILGLNKIVRMYSPVSILDIRQGPKEPFRDYVDRFYKTLRAEQASQDVKNWMTETLLVQNANPDCKTILKALGPAATLEEMMTACQGVGGPGHKARVLAEAMSQATNSTAIMMQRGNFRTQRKPVKCFNCGKEGHIARNCRAPRKKGCWKCGKEGHQMKDCTERQANFLGKIWPSHKGRPGNFLQSRPEPTAPTAPPEESFRFGEETTTPPQKQETIDKEKYPLASLRSLFGNDPLSQ

SEQ ID NO: 18 - protein, 502 aa, Human immunodeficiency virus
MGARASVLSGGELDRWEKIRLRPGGKKKYKLKHIVWASRELERFAVNPGLLETAEGCRKIIGQLQPSLQTGSEELRSLFNTVATLYCVHQKIDVKDTKEALDKIEEEQNKSKKKAQPAAAAAADTGNSSQVSQNYPIVQNLQGQMVHQPLSPRTLNAWVKVVEEKAFSPEVIPMFSALSEGATPQDINTMLNTVGGHQAAMQMLKETINEEAAEWDRLHPVHAGPAAPGQIREPRGSDIAGTTSTLQEQIAWMTHNPPIPVGEIYKKWIIIGLNKIVRMYSPTSILDIKQGPKEPFRDYVDRFYKTLRAEQASQDVKNWMTETLLVQNSNPDCKTILKALGPGATLEEMMTACQGVGGPGHKARVLAEAMSQANSATIMMQKGNFRSQRKTVKCFNCGKEGHIAKNCRAPRKKGCWKCGREGHQMKDCTERQANFLGKIWPSHKGRPGNFLQSRPEPSAPPEESFSFGEGTTAPSQKQEPTDKEMYPLASLRSLFGNDPSSQ

SEQ ID NO: 19 - protein, 502 aa, Human immunodeficiency virus
MGARASVLSGGELDRWEKIRLRPGGKKQYKLKHIVWASRELERFAVNPGLLETSEGCKQILLQLQPALQTGSEELKSLYNTVAVLYCVHQRIDVKDTKEALDRIEEEQNKSKKRAQQAAADTGNNSQNQVSQNYPIVQNFQGQMVHQALSPRTLNAWVKVVEEKAFSPEVIPMFSALAEGATPQDLNTMLNTVGGHQAAMQMLKETINEEAAEWDRLHPVQAGPVAPGQMREPRGSDIAGTTSTLQEQIDWMTHNPPIPVGEIYKRWIIMGLNKIVRMYSPVSILDIRQGPKEPFRDYVDRFYKTLRAEQASQDVKNWMTETLLVQNANPDCKTILKALGPAATLEEMMTACQGVGGPGHKARVLAEAMSQVNSGAIMMQRGNFRNQRKTIKCFNCGKEGHLARNCRAPRKKGCWKCGKEGHQMKECTEKQVNFLGKIWPSHKGRPGNFLQNRPEPTAPPAPPEESFRFGEETTTPPQKQEPIDKYPLASLRSLFGNDPLSQ

SEQ ID NO: 20 - protein, 503 aa, Human immunodeficiency virus
  misc_feature (112)..(112): Xaa can be any naturally occurring amino acid
  misc_feature (118)..(118): Xaa can be any naturally occurring amino acid
MGARASVLSGGQLDKWERIRLRPGGKKKYRLKHIVWASRELERFAVNPGLLESSNGCRQILEQLQPSLKTGSEELRSLYNTVATLYCVHQKIEVRDTKEALEKIEEEQNKSXKKAQQXAAAAADTGSSNQTSQNYPIVQNLQGQMVHQPISPRTLNAWVKVVEEKAFSPEVIPMFTALSEGATPQDLNTMLNTVGGHQAAMQMLKETINEEAAEWDRLHPVHAGPVAPGQMREPRGSDIAGTTSTLQEQIGWMTGNPPIPVGEIYKRWIVMGLNKIVRMYSPTSILDIRQGPKEPFRDYVDRFYKTLRAEQATQEVKNWMTETLLVQNANPDCKTILKALGPGATLEEMMSACQGVGGPGHKARVLAEAMSQVTNSATVMMQRGNFRNQRKTVKCFNCGKEGHIARNCRAPRKKGCWKCGQEGHQMKDCTERQANFLGKIWPSHKGRPGNFLQSRPEPTAPPEESFRFGEETTTPSQKQEPRDKELYPLASLRSLFGNDPSSQ

SEQ ID NO: 21 - protein, 504 aa, Human immunodeficiency virus
MGARASVLSGGKLDQWEKIRLRPGGKKKYRLKHIVWASRELERFAINPGLLETAEGCRQILGQIQPSLQTGSEELRSLYNTVATLYCVHQRMDVKDTKEALDKIEEEQNKSKQKAQRAQQAAADTGNNSNQVSQNYPIVQNMQGQMVHQAISPRTLNAWVKVVEEKAFSPEVIPMFTALSEGATPQDLNTMLNTVGGHQAAMQMLKETINEEAAEWDRLHPVQAGPVAPGQMRDPRGSDIAGTTSTLQEQIGWMTSNPPIPVGEIYKRWIILGLNKIVRMYSPTSILDIKQGPKEPFRDYVDRFYKTLRAEQASQEVKNWMTETLLVQNANPDCKTLLKALGPGATLEEMMTACQGVGGPGHKARVLAEAMSQMTNSATVMMQRGNFRNQRKTVKCFNCGKEGHIARNCRAPRKKGCWKCGREGHQMKDCTERQANFLGKIWPSHKGRPGNFLQSRPEPTAPPAESFGFGEGTTAPSQKQDPIDKELYPLASLKSLFGNDPSSQ

SEQ ID NO: 22 - protein, 500 aa, Human immunodeficiency virus
MGARASVLSGGKLDQWEKIRLRPGGKKQYHLKHIVWASRELERFAVNPGLLETSEGCRQILGQLQPALQTGSEELKSLYNTVAVLYCVHQRIDVKDTKEALEKIEEEQTQSKKKAQQAAADTENNKQVSQNYPIVQNLQGQMVHQAISPRTLNAWVKVVEEKAFSPEVIPMFSALSEGATPQDLNTMLNTVGGHQAAMQMLKETINEEAAEWDRLHPVHAGPIAPGQMREPRGSDIAGTTSTLQEQIGWMTNNPPIPVGEIYKRWIILGLNKIVRMYSPTSILDIRQGPKEPFRDYVDRFYKTLRAEQASQEVKNWMTETLLVQNANPDCKTILKALGPAATLEEMMTACQGVGGPGHKARVLAEAMSQMSTSPAIMMQRGNFKNQRKTIKCFNCGKEGHIARNCRAPRKKGCWKCGKEGHQMKDCTERQANFLGKIWPAHKGRPGNFLQSRPEPTAPPEESFRFGEETTTPSQKQEPTDKELYPLASLKSLFGNDPSSQ

SEQ ID NO: 23 - protein, 500 aa, Human immunodeficiency virus
MGARASVLSGGELDRWEKIRLRPGGKKKYRLKHVVWASRELERFAVNPGLLETSEGCRQILGQLQPSLQTGSEELKSLYNTVAVLYCVHQKIGVQDTKEALEKIEEEQNKSKKKAQQAVADTGNSSQVSQNYPIVQNIQGQMVHQPISPRTLNAWVKVVEEKAFSPEVIPMFSALSEGATPQDLNTMLNTVGGHQAAMQMLKDTINEEAAEWDRLHPVQAGPVAPGQMREPRGSDIAGTTSTLQEQIGWMTHNPPIPVGDIYKRWIILGLNKIVRMYSPTSILDIRQGPKEPFRDYVDRFYKTLRAEQASQDVKNWMTETLLVQNANPDCKTILKALGPAATLEEMMTACQGVGGPGHKARILAEAMSQVTNSTAIMMQKGNFRNQRKPVKCFNCGKEGHISKNCRAPRKKGCWKCGKEGHQMKDCTERQANFLGKIWPSSKGRPGNFLQNRPEPTAPPEESFRFGEETTTPSQKQEPIDKELYPLTSLRSLFGNDPSSQ

SEQ ID NO: 24 - protein, 500 aa, Human immunodeficiency virus
MGARASVLSGGELDKWEKIRLRPGGKKKYKLKHIVWASRELERFAVNPGLLETSGGCRQILGQLQPSLQTGSEELKSLYNTVAVLYCVHQRIEVKDTKEALDKIEEEQNKSKKKAQQAVADTGNSSQVSQNYPIVQNLQGQMVHQAISPRTLNAWVKVIEEKAFSPEVIPMFTALSEGATPQDLNTMLNTVGGHQAAMQMLKETINEEAAEWDRVHPVHAGPVAPGQMREPRGSDIAGTTSTLQEQIGWMTSNPPIPVGEIYKRWIILGLNKIVRMYSPVSILDIRQGPKEPFRDYVDRFYKTLRAEQASQDVKNWMTETLLVQNANPDCRTILKALGPAATLEEMMTACQGVGGPSHKARVLAEAMSQATNSSTVLMQKGNFRNQRKIIKCFNCGKEGHLARNCRAPRKKGCWKCGREGHQMKDCTERQANFLGKIWPSHKGRPGNFLQNRPEPSAPPEESFRFGEETATPSQKQEPIDKELYPLTSLKSLFGNDPLSQ

SEQ ID NO: 25 - protein, 503 aa, Human immunodeficiency virus
MGARASILSGGGLDRWEKIRLRPGGKKKYRLKHLVWASRELERFAVNPGLLETSEGCRQILGQLQPSLQTGSEELRSLFNTIAVLYCVHQRIDIKDTKEALEKIEEEQNKSKKKAQQAAADTGNSNPVSQNFPIVQNLQGQMVHQAISPRTLNAWVKVVEEKAFSPEVIPMFTALSEGATPQDLNTMLNTVGGHQAAMQMLKETINEEAAEWDRLHPPQAGPIAPGQMREPRGSDIAGTTSNLQEQIAWMTSNPAVPVGEIYKRWIILGLNKIVRMYSPTSILDIKQGPKEPFRDYVDRFYRTLRAEQASQDVKNWMTETLLVQNANPDCKTILRALGPAATLEEMMTACQGVGGPGHKAKILAEAMSQATASAAIMMQRGNYRNQRKPVKCFNCGKEGHIAKNCRAPRKKGCWKCGREGHQMKDCNERQANFLGKIWPSHKGRPGNFLQNRPEPTAPPAPPEESFRFGEETTTPPQKQETIDKELYPLTSLKSLFGNDPSSQ

SEQ ID NO: 26 - protein, 500 aa, Human immunodeficiency virus
MGARASVLSGGELDRWEKIRLRPGGKKKYKLKHIVWASRELERFAVNPGLLETSGGCRQILGQLQPSLQTGSEELKSLYNTVATLYCVHQKIDVKDTKEALEKIEEEQNKSKKKAQQAAADAEKSQASQNYPIVQNLQGQMVHQAISPRTLNAWVKVVEEKAFSPEVIPMFSALSEGATPQDLNTMLNTVGGHQAAMQMLKETINEEAAEWDRLHPVHAGPVAPGQMREPRGSDIAGTTSTLQEQIGWMTNNPPIPVGEIYKRWIILGLNKIVRMYSPTSILDIKQGPKEPFRDYVDRFYKVLRAEQASQEVKNWMTETLLVQNANPDCKTILKALGPAATLEEMMTACQGVGGPGHKARVLAEAMSQVTNSATVMMQRGNPRNQRRPVKCFNCGKEGHIAKNCRAPRRRGCWKCGKEGHQMKDCTERQANFLGKIWPSHKGRPGNFLQSRPEPTAPPPPESFGFGEETAAPSQKQEPIDKELYPLASLKSLFGNDPSSQ

SEQ ID NO: 27 - protein, 500 aa, Human immunodeficiency virus
MGARASVLSGGKLDRWEKIRLRPGGKKKYKLKHIVWASREVERFAVNPGLLETSEGCRQILGQLQPSLQTGSEELKSLFNAVAVLYCVHQGMEIKDTKEALDKIEEEQNKSKKKAQQAEAGTGNSSQISQNYPIVQNLQGQMVHQAISPRTLNAWVKVIEEKAFSPEVIPMFSALSEGATPQDLNTMLNTVGGHQAAMQMLKETINEEAAEWDRLHPVHAGPNAPGQMREPRGSDIAGSTSTLQEQIGWMTSNPPIPVGEIYKRWIILGLNKIVRMYSPTSILDIRQGPKEPFRDYVDRFYKTLRAEQASQEVKNWMTETLLVQNANPDCKTILKALGPAATLEEMMTACQGVGGPSHKARVLAEAMSQATGPAAIMMQKGNFRPQRKTIKCFNCGKEGHLAKNCRAPRKKGCWKCGKEGHQMKDCTERQVNFLGKIWPSHKGRPGNFLQSRLEPTAPPEESFRFGEETTTPSQKQEPRDQELYPLASLKSLFGNDPSSQ

SEQ ID NO: 28 - protein, 498 aa, Human immunodeficiency virus
MGARASVLSGGKLDKWEKIRLRPGGKKKYKLKHIVWASRELERFAVNPGLLETSEGCRQILMQLQPSLQTGSEELKSLYNTVATLYCVHQNVEIRDTKEALDKIEEERNKSKKKAQQAAADTGTNSQVSQNYPIVQNLQGQMVHQPISPRTLNAWVKVVEEKAFSPEVIPMFSALSEGATPQDLNTMLNTVGGHQAAMQMLKETINEEAAEWDRVHPVHAGPIAPGQMREPRGSDIAGTTSTLQEQIGWMTNNPPIPVGEIYKRWIILGLNKIVRMYSPTSILDIRQGPKEPFRDYVDRFYRTLRAEQASQDVKNWMTETLLVQNANPDCKTILKALGPAATLEEMMTACQGVGGPGHKARVLAEAMSQVTNSATIMMQRGNFRNQRKIVKCFNCGKEGHIAKNCRAPRKRGCWKCGKEGHQMKDCTERQANFLGKIWSSQKGRPGNFLQSRPEPTAPPEERFREETTTPSQKQEPIDKELYPLASLRSLFGNDPSLQ

SEQ ID NO: 29 - protein, 498 aa, Human immunodeficiency virus
MGARASVLSGGELDKWERIRLRPGGKKKYKLKHIVWASRELERFALNPGLLETSEGCRQIIGQLQPSLKTGSEEIKSLYNTVATLYCVHQRIEVKDTKEALDKIEEEQNKSKKKAQQAAADTGNSSSKVSQNYPIVQNLQGQMVHQPLSPRTLNAWVKVVEEKNFSPEVIPMFTALSEGATPQDLNTMLNTIGGHQAAMQMLKETINEEAAEWDRLHPVHAGPIAPGQMREPRGSDIAGTTSNLQEQIGWMTNNPPIPVGEIYKRWIILGLNKIVRMYSPTSILDIRQGPKEPFRDYVDRFYKTLRAEQASQDVKNWMTETLLVQNANPDCKTILKALGPGASLEEMMTACQGVGGPGHKARVLAEAMSQVTTPPAIMMQKGNFRNQRKIVKCFNCGKEGHIAKNCRAPRKRGCWKCGKEGHQMKDCTERQANFLGKIWPSHKGRPGNFLQSRPEPSAPPAESFGFGEETTTPPQKQESRDKELYPLASLKSLFGNDP

SEQ ID NO: 30 - protein, 500 aa, Human immunodeficiency virus
MGARASVLSGGELDRWEKIRLRPGGKKKYRLKHIVWASRELERFAVNPGLLETAGGCKQIMEQLQPSLQTGSEELRSLFNTIAVLYCVHQRIEVKDTKEALEKVEEEQNKSKKKAQQAAADTGRNSQVSQNYPIVQNLQGQMVHQSISPRTLNAWVKVVEEKAFSPEVIPMFSALSEGATPQDLNTMLNTVGGHQAAMQMLKETINEEAAEWDRLHPVQAGPVAPGQIRDPRGSDIAGTTSTLQEQITWMTNNPPIPVGEIYKRWIILGLNKIVRMYSPISILDIRQGPKEPFRDYVDRFYKTLRAEQASQDVKNWMTETLLVQNANPDCRTILKALGPAATLEEMMTACQGVGGPGHKARVLAEAMSQATNSATIMMQKGNFRNQRRTVKCFNCGKEGHIAKNCRAPRKKGCWKCGREGHQMKDCTERQANFLGKIWPSHSGRPGNFLQSRPEPTAPPEESFRFGEETTPSQKKEQIDKELYPPLASLKSLFGNDPSSQ

SEQ ID NO: 31 - protein, 500 aa, Human immunodeficiency virus
MGARASILSGGQLDKWEKIRLRPGGKKKYKFRHIVWASRELERFAVNPSLLETSEGCRQILGQLQPSLQTGSEELKSLYNTVAVLYCVHQRIEIKDTKDALDKIEEEQNKSKKKAQQAAADTGNSSQVSQNYPVVQNLQGQMVHQAISPRTLNAWVKVIEEKAFSPEVIPMFSALSEGATPGDLNTMLNTVGGHQAAMQMLKETINEEAAEWDRLHPVQAGPVAPGQMREPRGSDIAGTTSTLQEQIGWMTSNPPIPVGEIYKRWIILGLNKIVRMYSPVSILDIRQGPKEPFRDYVDRFYKTLRAEQASQEVKNWMTETLLVQNANPDCKTILKALGPGATLEEMMTACQGVGGPSHKARVLAEAMSQVTNSATIMMQRDNFKNQRRIVKCFNCGKVGHIAKNCRAPRKKGCWKCGKEGHQMKDCTERQANFLGRIWPSHKGRPGNFLQSRPEPSAPPEESFRFGEEAAAPSQKQEPIDKEMYPLASLRSLFGNDPSSQ

SEQ ID NO: 32 - protein, 500 aa, Human immunodeficiency virus; identical to SEQ ID NO: 26

SEQ ID NO: 33 - protein, 509 aa, Human immunodeficiency virus
MGARASVLSGGELDRWEKIRLRPGGKKQYKLKHIVWASRELERFALNPGLLETSEGCRQILEQLQPSLQTGSEEIKSLYNTVAVLFCVHQRIDVKDTKEALDKIEEEQNKSKKKAQQAAAATGNSNPGSSQVSQNYPIVQNMQGQMVHQPISPRTLNAWVKVVEEKAFSPEVIPMFSALAEGATPQDLNTMLNTVGGHQAAMQMLKETINEEAAEWDRLHPVHAGPIAPGQIREPRGSDIAGTTSNLQEQIAWMTHNPPIPVGEIYKRWIILGLNKIVRMYSPTSILDIKQGPKEPFRDYVDRFYRTLRAEQASQEVKNWMTETLLVQNANPDCKTILKALGPAATLEEMMTACQGVGGPGHKARVLAEAMSQVTNSATIMMQRGNFRNQRKIVKCFNCGKEGHIARNCRAPRKKGCWKCGKEGHQMKDCSERQANFLGKIWPSHKGRPGNFLQSRPEPTAPPAESFLFGEETTTPSQKQEPIKQEPIDKELYPLASLKSLFGNDPSSQ

SEQ ID NO: 34 - protein, 509 aa, Human immunodeficiency virus
MGARASILSGGELDRWEKIRLRPGGKKKYKLKHIVWASRELERFAVNPGLLETSEGCRQILRQLQPSLQTGSEELKSLYNTVATLYCVHQRIDVKDTKEALDKIEEEQNRSKKQAQQAAADTGNSSSQAHSSQVSQVSQNYPIVQNMQGQMVHQAISPRTLNAWVKVVEEKAFSPEVIPMFSALSEGATPQDLNTMLNTVGGHQAAMQMLKETINEEAAEWDRLHPVHAGPIAPGQMREPRGSDIAGTTSTLQEQIGWMTNNPPIPVGEIYKRWIILGLNKIVRMYSPTSILDIRQGPKEPFRDYVDRFYKTLRAEQASQEVKNWMTETLLVQNANPDCKTILKALGPAATLEEMMTACQGVGGPGHKARVLAEAMSQVTNSATIMMQKGNFRNPRKTVKCFNCGKDGHIARNCRAPRKKGCWKCGKEGHQMKDCNERQANFLGKIWPSHKGRPGNFLQSRPEPSAPPAESFKFGEETTTPSQKQEPIDKEMYPLASLKSLFGNDPLSQ

SEQ ID NO: 35 - protein, 501 aa, Human immunodeficiency virus
MGARASVLSGGELDRWEKIRLRPGGKKKYKLKHIVWASRELERFAVNPGLLETSAGCRQILGQLQPSIQTGSEELKSLYNTVATLYCVHQKIDVKDTKEALEKIEEEQNKSKKKAQQAAADTGNSSQVSQNYPIVQNMQGQMVHQAISPRTLNAWVKVIEEKAFSPEVIPMFVALSEGATPQDLNTMLNTVGGHQAAMQMLKETINEEAAEWDRAHPVHAGPVAPGQMREPRGSDIAGTTSTLQEQIGWMTQNPPIQVGEIYKRWIILGLNKIVRMYSPVSILDIRQGPKEPFRDYVDRFYKTLRAEQASQEVKNWMTETLLVQNANPDCKTILKALGPGATLEEMMTACQGVGGPGHKARVLAEAMSQIATPPAIMMQRGNFRGQRKVVKCFNCGKEGHIAKNCRAPRKRGCWKCGKEGHQMKDCTERQANFLGKIWPSSKGRPGNFLQSRPEPTAPPEESFRFGEETTTPPQKQEPPRDKELYPLASLRSLFGNDPSSQ

SEQ ID NO: 36 - protein, 521 aa, Human immunodeficiency virus
MGARASILSGGELDKWEKIRLRPGGKKKYKLKHIVWASRELERFAVNPGLLETSEGCRQILEQLQPSLQTGSEELKSLYNTIAVLYCVHQRIEVKDTKEALDKIEEEQNKSKKRAQQAAAQQAAAAADTGNRNQVSQNYPIVQNLQGQMVHQAISPRTLNAWVKVVEEKAFSPEVIPMFTALSEGATPQDLNTMLNTVGGHQAAMQMLKETINEEAADWDRTQPVHAGPIAPGQMREPRGSDIAGTTSTLQEQVAWMTSNPPIPVGEIYKRWIILGLNKIVRMYSPTSILDIKQGPKEPFRDYVDRFYKTLRAEQATQEVKNWMTETLLVQNANPDCKTILKALGPAATLEEMMTACQGVGGPSHKARVLAEAMSQVTNSATIMMQRGNFRNQRKTVKCFNCGKEGHIAKNCRAPRKKGCWKCGREGHQMKDCTERQANFLGRIWPSHKGRPGNFLQSRPEPTAPLEESFRSRPEPTAPPAESFRFGEEAAAPSQKREPTDQELYPLASLKSLFGNDPSSQ

SEQ ID NO: 37 - protein, 501 aa, Human immunodeficiency virus
MGARASVLSGGELDRWEKIRLRPGGRKKYQLKHIVWASRELERFALNPGLLETSEGCRRILGQLQPSLQTGSEELRSLYNTVATLYCVHQKIDVKDTKEALDKIEEEQNKSKKKAQQAAAADTGNSNQVSQNYPIVQNLQGQMVHQAISPRTLNAWVKVVEEKAFSPEVIPMFSALSEGATPQDLNTMLNTVGGHQAAMQMLKETINEEAAEWDRLHPVHAGPIAPGQMREPRGSDIAGTTSTLQEQIGWMTNNPPIPVGEIYKRWIILGLNKIVRMYSPTSILDIKQGPKEPFRDYVDRFYKTLRAEQASQEVKNWMTETLLVQNANPDCKTILKALGPAATLEEMMTACQGVGGPGHKARVLAEAMSQVTNSATIMMQKGNFRSQRKTVKCFNCGKEGHIAKNCRAPRKRGCWKCGKEGHQMKDCTERQANFLGRIWPSHKGRPGNFLQSRPEPTAPPEESFRFGEETTTPPQNPEMRDKELYPLASLRSLFGNDPSSQ

SEQ ID NO: 38 - protein, 499 aa, Human immunodeficiency virus
MGARASVLSGGELDRWEKIRLRPGGKKKYRLKHVVWASRELERFAVNPGLLETSEGCRQILGQLQPSLKTGSEELRSLFNTVAVLYCVHQKIDVKDTKEALEKIEEEQNKSKQKTQQAAAGGNSSQVSQNYPIVQNMQGQMVHQAISPRTLNAWVKVVEEKAFSPEVIPMFSALSEGATPQDLNTMLNTVGGHQAAMQMLKETINEEAAEWDRLHPVQAGPVAPGQMRDPRGSDIAGTTSTLQEQIGWMTSNPPIPVGEIYKRWIILGLNKIVRMYSPTSILDIKQGPKEPFRDYVDRFYKTLRAEQASQEVKHWMTETLLVQNANPDCKTILKALGPGATLEEMMTACQGVGGPGHKARVLAEAMSQVTNSATIMMQKGNFKNQRKIVKCFNCGKEGHIARNCRAPRKKGCWKCGKEGHQMKDCTERQVNFLGKIWPSHKGRPGNFLQNRPEPTAPPEESFRFGEETTTPAQKQEPIDKELYPLASLKSLFGNDPSSQ

SEQ ID NO: 39 - protein, 500 aa, Human immunodeficiency virus
  misc_feature (383)..(383): Xaa can be any naturally occurring amino acid
MGARASVLSGGKLDRWEKIRLRPGGKKQYKLKHIVWASRELERFAINPGLLETSEGCKQIMEQIQPALQTGSEELRSLYNTIAVLYCVHQGIDVKDTKEALDKIEEEQNKSKKKAQQAAAGTGNSSQVSQNYPIVQNLQGQMVHQAISPRTLNAWVKVVEEKAFSPEVIPMFSALSEGATPQDLNTMLNTVGGHQAAMQMLKETINEEAAEWDRLHPVHAGPIAPGQMREPRGSDIAGTTSTLQEQIGWMTNNPPIPVGEIYKRWIILGLNKIVRMYSPTSILDIKQGPKEPFRDYVDRFYKTLRAEQASAEVKNWMTETLLVQNANPDCKTILKALGPAATLEEMMTACQGVGGPGHKARVLAEAMSQVTNSATIMMQKGNXRSQKRMIKCFNCGKEGHIARNCRAPRKKGCWKCGREGHQMKDCTERQANFLGKIWPSSKGRPGNFLQSRPEPTAPPEESFRFGEEMTTPSQKQEPIDKEMYPLASLKSLFGNDPSSQ

SEQ ID NO: 40 - protein, 509 aa, Human immunodeficiency virus
  misc_feature (50)..(50): Xaa can be any naturally occurring amino acid
  misc_feature (82)..(82): Xaa can be any naturally occurring amino acid
  misc_feature (104)..(104): Xaa can be any naturally occurring amino acid
  misc_feature (135)..(135): Xaa can be any naturally occurring amino acid
  misc_feature (183)..(183): Xaa can be any naturally occurring amino acid
  misc_feature (261)..(261): Xaa can be any naturally occurring amino acid
  misc_feature (288)..(288): Xaa can be any naturally occurring amino acid
  misc_feature (301)..(301): Xaa can be any naturally occurring amino acid
  misc_feature (335)..(335): Xaa can be any naturally occurring amino acid
  misc_feature (340)..(340): Xaa can be any naturally occurring amino acid
  misc_feature (379)..(379): Xaa can be any naturally occurring amino acid
  misc_feature (398)..(398): Xaa can be any naturally occurring amino acid
  misc_feature (492)..(492): Xaa can be any naturally occurring amino acid
MGARASILSGGQLDRWEKIRLRPGGRKKYKLKHLVWASRELERFAVNPGXLETSEGCRQILEQLQPSLKTGSEELRSLFNTXATLYCVLQRIEIKDTKEALEKXEEEQNKSKKKTQQAAAAADTGNRSPVSQGSXQVSQNYPIVQNLQGQMVHQPLSPRTLNAWVKVIEEKAFSPEVIPMFSXLSEGATPQDLNTMLNTVGGHQAAMQMLKETINEEAAEWDRLHPVHAGPAAPGQMREPRGSDIAGTTSTLQEQIGWMTXNPPIPVGEIYKRWIILGLNKIVRMYSXVSILDIRQGPKEXFRDYVDRFYKTLRAEQATQEVKNWMTETLLVQNXNPDCXTILKALGPAATLEEMMTACQGVGGPGHKARVLAEAMSQXTGSATIMMQKGNFRNQRKXVKCFNCGKEGHIARNCRAPRKKGCWKCGKEGHQLKDCTERQANFLGKIWPSHKGRPGNFLQSRPEPTAPPEESFRFGEETAMPSQKQEPIDKEXYPLASLKSLFGNDPSSQ

SEQ ID NO: 41 - protein, 497 aa, Human immunodeficiency virus
  misc_feature (114)..(114): Xaa can be any naturally occurring amino acid
  misc_feature (258)..(258): Xaa can be any naturally occurring amino acid
  misc_feature (381)..(381): Xaa can be any naturally occurring amino acid
MGARASVLSGGELDRWEKIRLRPGGKKQYKLKHIVWASRELERFAINPGLLETSEGCKQIIEQLQPSLQVGSEEIKSLYNTVATLYCVHKKIDVKDTKEALEKIEEEKNRSKKXAQQAAADSSQVSQNYPIVQNLQGQMVHQALSPRTLNAWVKVIEEKAFSPEVIPMFSALSEGATPQDLNTMLNTVGGHQAAMQMLKETINEEAAEWDRLHPVHAGPIAPGQMREPRGSDIAGTTSTLQEQIGWMTNNPPIPVGEXYKRWIILGLNKIVRMYSPVSILDIRQGPKEPFRDYVDRFYKTLRAEQCTQDVKNWMTETLLVQNANPDCKTILKALGPAATLEEMMTACQGVGGPSHKARVLAEAMSQATTPAAIMMQRGNFXNQRKTVKCFNCGREGHIAKNCRAPRKKGCWKCGKEGHQMKDCTERQANFLGKIWPSNKGRPGNFLQSRPEPTAPPEESFRFGEETTTPSQKQEPRDKDLYPLASLKSLFGNDPSSQ

SEQ ID NO: 42 - protein, 504 aa, Human immunodeficiency virus
  misc_feature (75)..(75): Xaa can be any naturally occurring amino acid
  misc_feature (330)..(330): Xaa can be any naturally occurring amino acid
  misc_feature (435)..(435): Xaa can be any naturally occurring amino acid
MGARASVLSGGELDRWEKIRLRPGGKKRYKLKHIVWASRELERFAVNPGLLETSEGCRQILGQLQPALQTGSEEXRSLYNTVATLYCVHQRIEVKDTKEALDKIEEEQNKSKKKAQQAAPQAAAGAGNNSQVSYNYPIVQNIQGQMVHQAISPRTLNAWVKVIEEKAFSPEVIPMFSALSEGATPQDLNTMLNTVGGHQAAMQMLKETINEEAAEWDRVHPVHAGPTAPGQMREPRGSDIAGTTSTLQEQIGWMTSNPPIPVGEIYKRWIILGLNKIVRMYSPTSILDIRQGPKEPFRDYVDRFYKTLRAEQASQEVKNWMTETLLVQNXNPDCKTILKALGPGATLEEMMTACQGVGGPSHKARVLAEAMSQAQSSANMMMQRGNFRNQRKTVKCFNCGKEGHIAKNCRAPRKKGCWKCGKEGHQMKDCTERQXNFLGKLWPSHKGRPGNFLQSRPEPTAPPEESFKFGGETTTPPQKQEPIDKEMYPLASLRSLFGNDPSSQ

SEQ ID NO: 43 - protein, 510 aa, Human immunodeficiency virus
  misc_feature (90)..(90): Xaa can be any naturally occurring amino acid
  misc_feature (139)..(139): Xaa can be any naturally occurring amino acid
  misc_feature (163)..(163): Xaa can be any naturally occurring amino acid
  misc_feature (169)..(169): Xaa can be any naturally occurring amino acid
  misc_feature (368)..(368): Xaa can be any naturally occurring amino acid
MGARASILSGGELDRWEKIRLRPGGKKQYKLKHIVWASRELERFAVNPGLLETSEGCRQILEQLQPSLPTGSEEIKSLYNTVATLYCVHXRIDVKDTKEALDKIEEEQNKSKIKAQQAAAQQAAAATGSSQVSQNYPIXQNLQGQMVHQPISPRTLNAWVKVXEEKAFXPEVIPMFSALSEGATPQDLNTMLNTVGGHQAAMQMLKETINDEAAEWDRLHPVHAGPIAPGQMREPRGSDIAGTTSTLQEQIGWMTNNPPIPVGEIYKRWIILGLNKIVRMYSPTSILDIRQGPKEPFRDYVDRFYKTLRAEQASQDVKNWMTETLLVQNANPDCKTILKALGPAATLEEMMTACQGVGGPGHKARVLXEAMSQVQNSNAIMMQRGNFKTQRKIVKCFNCGKEGHIARNCRAPRKRGCWKCGKEGHQMKDCTTERQANFLGKIWPSHKGRPGNFLQSRPEPTAPPEESFRFGEEAAAPSQKQEPMHKEKQEPRDKELYPLASLRSLFGNDP

SEQ ID NO: 44 - protein, 503 aa, Human immunodeficiency virus
  misc_feature (119)..(119): Xaa can be any naturally occurring amino acid
  misc_feature (140)..(140): Xaa can be any naturally occurring amino acid
  misc_feature (258)..(258): Xaa can be any naturally occurring amino acid
  misc_feature (261)..(261): Xaa can be any naturally occurring amino acid
  misc_feature (268)..(268): Xaa can be any naturally occurring amino acid
MGARASVLSGGELDRWERIRLRPGGNKKYKLKHIVWASRELERFAVNPGLLETAEGCRQILGQLQPSLQTGSEELRSLYNTVAVLYCVHQKIEVKDTKEALDKVEEEQNKCKNKAQQAXAGTGNNSQASQNYPIVQNIQXQMVHQPLSPRTLNAWVKVVEEKAFSPEVIPMFSALSEGATPQDLNTMLNTVGGHQAAMQMLKETINEEAAEWDRLHPVHAGPIAPGQIREPRGSDIAGTTSTLQEQIAWMTNNPPIPXGEXYKRWIIXGLNKIVRMYSPTSILDIKQGPKEPFRDYVDRFYKTLRAEQASQEVKNWMTETLLVQNSNPDCKTILKALGPAATLEEMMTACQGVGGPSHKARILAEAMSQVTNSAAIMMQKGNFRKQRNSVKCFNCGKEGHVARNCRAPRKKGCWKCGKEGHQMKDCTERQANFLGKIWPSHKGRPGNFLQNRPEPTAPPAPPEESFRFGEETTTPSQKQEPIDKELYPLASLKSLFGNDPLSQ

SEQ ID NO: 45 - protein, 505 aa, Human immunodeficiency virus
MGARASVLSGGELDRWEKIRLRPGGKKKYRLKHIVWASRELERFAVNPGLLETSEGCRQILGQLQPSLQTGSEELKSLYNTIAVLYCVHQRIDVKDTKEALEKIEEEQNKSKKRAQQAAADTGNSSQVSQNYPIVQNLQGQMVHQPIAPRTLNAWVKVVEEKAFSPEVIPMFAALSEGATPQDLNTMLNTVGGHQAAMQMLKETINEEAAEWDRLHPAQAGPVAPGQMRDPRGSDIAGTTSTLQEQIGWMTSNPPIPVGEIYKKWIIIGLNKIVRMYSPTSILDIKQGPKEPFRDYVDRFYKTLRAEQASQEVKNWMTETLLVQNANPDCKTILKALGPAATLEEMMSACQGVGGPSHKAKVLAEAMSQVTNSATATMMMQRGNFRNQRKPVKCFNCGKEGHIARNCRAPRKKGCWKCGKEGHQMKDCTERQANFLGKIWPSYKGRPGNFLQSRPEPTAPPAPPEESFRFGEETTTPLQKQEQTDKELYPLASLKSLFGNDPSST

SEQ ID NO: 46 - protein, 501 aa, Human immunodeficiency virus
MGARASVLRGGELDRWEKIRLRPGGKKKYQLKHIVWASRELERFAVNPSLLETSEGCRQILRQLQPSLQTGSEELKSLYNTIAVLYCVHQKIEIKDTKEALDKIEEEQNESKKKAQRQAAEADPGKNSQVSQNYPIVQNLQGQMVHNPISPRTLNAWVKVVEEKAFSPEVIPMFSALSEGATPQDLNTMLNTVGGHQAAMQMLKETINEEAAEWDRLHPVHAGPIAPGQMREPRGSDIAGTTSTLQEQIAWMTNNPPIPVGDIYKRWIIMGLNKIVRMYSPTSILDIRQGPKEPFRDYVDRFYKTLRAEQASQEVKNWMTETLLVQNANPDCKTILKALGPAATLEEMMTACQGVGGPGHKARVLAEAMNQANSAAIMMQRGNFKNQRRTIKCFNCGREGHLARNCRAPRKKGCWKCGKEGHQMKDCTERQANFLGKIWPSLKGRPGNFLQNRPEPSAPPAESFGFGEETTTPPQKQEPIDKELYPLTSLKSLFGSDPSSQ

SEQ ID NO: 47 - protein, 500 aa, Human immunodeficiency virus
MGARASVLSGGKLDRWEKIRLRPGGKKRYKLKHIVWASRELERFAVNPGLLETSEGCRQILGQLQPALKTGSEELKSLYNTVATLYCVHQSIDVRDTKEALDKIEEEQNKSKKKAQQAAADTGNSSQVSQNYPIVQNLQGQMVHQAISPRTLNAWVKVVEEKAFSPEVIPMFSALSEGATPQDLNTMLNTVGGHQAAMQMLKETINEEAAEWDRLHPVHAGPVAPGQMREPRGSDIAGVTSTLQEQIGWMTHNPPVPVGEIYKKWIIMGLNKIVRMYSPTSILDIRQGPKEPFRDYVDRFYKTLRAEQASQEVKNWMTETLLVQNSNPDCKTILKALGPAATLEEMMTACQGVGGPGHKARVLAEAMGQVTNSATIMMQKGNFRNQRKTVKCFNCGKDGHIARNCRAPRKKGCWKCGREGHQMKDCTERQANFLGKIWPSHKGRPGNFLQSRPEPTAPPAPPEESFRFGEEAAAPPQKQEPIDKELYPLASLRSLFGNDP

SEQ ID NO: 48 - protein, 502 aa, Human immunodeficiency virus
MGARASVLSGGELDRWEKIRLRPGGKKTYKLKHLVWASRELERFAVNPGLLETSEGCRQILGQLQPSLQTGSEELKSLFNTVATLYCVHQRIQVRDTKEALDKIEEEQNKSKKKAQQAAAAADTGNSSNVSQNYPIVQNMQGQMVHQPISPRTLNAWVKVIEEKAFSPEVIPMFSALSEGATPGDLNTMLNTVGGHQAAMQMLKETINEEAAEWDRLHPVQAGPVAPGQIREPRGSDIAGTTSTLQEQIAWMTNNPPIPVGDIYKRWIILGLNKIVRMYSPTSILDIKQGPKEPFRDYVDRFYKTLRAEQASQEVKNWMTETLLVQNANPDCKTILKALGPACTLEEMMTACQGVGGPSHKARVLAEAMSQVTNSATIMMQRGNFRDQRKTVKCFNCGKEGHIARNCRAPRKKGCWKCGQEGHQMKDCTGRQANFLGKIWPSHKGRPGNFLQSRPEPTAPPAESFTFGEEAATPSQKQETRDKELYPLASLRSLFGNDPSSQ

SEQ ID NO: 49 - protein, 504 aa, Human immunodeficiency virus
  misc_feature (129)..(129): Xaa can be any naturally occurring amino acid
  misc_feature (228)..(228): Xaa can be any naturally occurring amino acid
MGARASVLSGGELDRWEKIRLRPGGKKKYRLKHIVWASRELERFAVNPGLLETSEGCRQILGQLQPSLQTGSEELRSLYNTIATLYCVHQRIDIKDTKEALDKIEEEQNKSKKKVQQAAAAADTGSSSXQVSQNFPIVQNLQGQMVHQALSPRTLNAWVKVVEEKAFSPEVIPMFSALSEGATPQDLNTMLNTVGGHQAAMQMLKETINEEAAEWDRLHPVHAGPIAXGQMREPRGSDIAGTTSTLQEQIGWMTHNPPIPVGEIYKRWIILGLNKIVRMYSPTSILDIKQGPKEPFRDYVDRFYRTLRAEQASQEVKNWMTETLLVQNSNPDCKTILKALGPAATLEEMMTACQGVGGPGHKARVLAEAMSQVTNPTNIMMQRGNFRNQRKPVKCFNCGKEGHIARNCRAPRKRGCWKCGKEGHQMKDCTERQANFLGKIWPSQKGRPGNFPQGRLEPTAPPEESFRSGEETATPSQRQETVDKELYPPLTSLRSLFGSDPSSQ

SEQ ID NO: 50 - protein, 508 aa, Human immunodeficiency virus
  misc_feature (84)..(84): Xaa can be any naturally occurring amino acid
MGARASVLSGGELDRWEKISLRPGGKKKYRLKHLVWASRELERFAVNPGLLETSDGCRQIMEQLQPALRTGSEELKSLFNTVAXLYCVHQRIQIKDTKEALDKIEEEQNKSKKKAQQAAADTGNNSQGNNSQVSQNYPIVQNMQGQMVHQAMSPRTLNAWVKVIEEKAFSPEVIPMFAALSEGATPQDLNTMLNTVGGHQAAMQMLKETINEEAAEWDRMHPVHAGPLPPGQMREPRGSDIAGTTSNLQEQIGWMTSNPPIPVGEIYKRWIILGLNKIVRMYSPSSILDIKQGPKEPFRDYVDRFYKTLRAEQASQEVKNWMTETLLVQNSNPDCKTILKALGPAATLEEMMTACQGVGGPSHKARVLAEAMSQVNNSAAIMMQKGNFRNQKKIPKCFNCGKEGHIARNCRAPRKRGCWKCGKEGHQMKDCTERQANFLGKIWPSHKGRPGNFLQSRPEPTAPPAPPEESFRFGEETTTPSQKQESGNKELYPLASLRSLFGSDPSSQ

SEQ ID NO: 51 - protein, 506 aa, Human immunodeficiency virus
MGARASVLSGGKLDAWEKIRLRPGGNKRYRLKHIVWASRELERFAVNPGLLETAEGCRQIIGQLQPSLKTGSEELRSLFNTVATLYCVHQRIEVKDTKEALDKIEEEQNKCKEKAQQAAANTGNSGQVSQNYPIVQNLQGQMVHQAISPRTLNAWVKVIEEKAFSPEVIPMFSALSEGATPQDLNTMLNTVGGHQAAMQMLKETINEEAAEWDRLHPVQAGPNPPGQMREPRGSDIAGTTSTLQEQIAWMTNNPPIPVGEIYKRWIILGLNKIVRMYSPVSILDIRQGPKEPFRDYVDRFYKTLRAEQATQEVKNWMTETLLVQNANPDCKTILKALGPAATLEEMMTACQGVGGPGHKARVLAEAMSQATNTAAIMMQRGNFRNQRKTVKCFNCGKEGHIARNCRAPRKKGCWKCGKEGHQMKECTERQANFLGKVWPSHKGRPGNFLQSRLEPTAPPAESFRFGEETTTPQQKQAPPQKQEPTDKELYPLTSLRSLFGNDPSSQ

SEQ ID NO: 52 - protein, 506 aa, Human immunodeficiency virus
MGARASVLSGGELDRWEKIRISPGGKKKYRLKHIVWASRELERFAVNPGLLETAQGCRQILEQLQPSLQTGSEEFRSLYNTIATLYCVHQKIEVKDTKEALDQIEEEQTKSKKKAQQAAAAQQAAAAAETSSQVSQNYPIVQNMQGQMVHQAISPRTLNAWVKVVEEKAFSPEVIPMFSALSEGATPQDLNTMLNTVGGHQAAMQMLKDTINEEAAEWDRLHPVHAGPIAPGQMREPKGSDIAGTTSTLQEQIGWMTHIPPIPVGEIYKRWIILGLNKIVRMYSPTSILDIKQGPKEPFRDYVDRFYRTLRAEQASQDVKNWMTETLLVQNANPDCKTILKALGPAATLEEMMTACQGVGGPGHKARVLAEAMSQVTGSATIMMQKGNFRNQRKMVKCFNCGKEGHIARNCRAPRKRGCWKCGKEGHQMKDCTERQANFLGKIWPSHKGRPGNFLQSRPEPTAPPEESFRSGEETTAPSQKQEPKDKELYPLASLRSLFGNDPSSQ

SEQ ID NO: 53 - protein, 508 aa, Human immunodeficiency virus
MGARASVLSGGKLDKWEKIRLRPGGKKQYKLKHIVWASRELERFAVNPGLLETPEGCRQILGQLQPSLQTGSEELKSLFNTIAVLYCVHQNIEVRDTKEALDKIEEEQNKSKKKAQQAAADTGNSSQVRNSGQVSQNYPIVQNLQGQMVHQAISPRTLNAWVKVIEEKAFSPEVIPMFTALSEGATPQDLNTMLNTVGGHQAAMQMLKETINEEAAEWDRMHPVHAGPAAPGQMREPRGSDIAGTTSTLQEQIAWMTGNPPVPVGEIYKRWIILGLNKIVRMYSPTSILDIRQGPKEPFRDYVDRFYKTLRAEQASQEVKNWMTETLLVQNSNPDCKTILKALGPGATLEEMMTACQGVGGPGHKARVLAEAMSQVTNSNTIMMQRGNFRNQRKTVKCFNCGKEGHIARNCRAPRKKGCWKCGKEGHQMKDCTERQANFLGKIWPSHKGRPGNFLQNRPEPSAPPEESFRFGEETITPSQKQEQTDRDKEKYPLTSLRSLFGNDPLSQ

SEQ ID NO: 54 - protein, 504 aa, Human immunodeficiency virus
MGARASVLSGGELDRWERIRLRPGGKKKYRLKHIVWASRELERFAVNPGLLETSEGCRQIIRQLQPSLQTGSEELRSLYNTVATLYCVHQKIDVKDTKEALDKIEEEQNKSKKMAQQAAADTGNSSSQVSQVSQNYPIVQNIQGQMVHQALSPRTLNAWVKVVEEKAFSPEVIPMFSALSEGATPQDLNTMLNTVGGHQAAMQMLKETINEEAAEWDRLHPVQAGPVAPGQMREPRGSDIAGTTSTLQEQIGWMTHNPPIPVGEIYKRWIILGLNKIVRMYSPASILDIKQGPKEPFRDYVDRFYKTLRAEQASQEVKNWMTETLLVQNANPDCKTILKALGPAATLEEMMTACQGVGGPSHKARVLAEAMSQVTNSNTIMMQRGNFRNQKRTVKCFNCGKDGHIARNCRAPRKRGCWKCGKEGHQMKECTERQANFLGKVWPSHKGRPGNFLQSRPEPTAPPEKSFRFGEETAAPPQKQEPIDKGLYPSASLRSLFGNDPSSQ

SEQ ID NO: 55 - protein, 500 aa, Human immunodeficiency virus
MGARASVLSGGELDRWEKIRLRPGGKKQYRLKHIVWASRELERFAVNPGLLETSEGCRQILRQIQPSLQTGSEELKSLYNTVAVLYCVHQRIIVRDTKEALDKIEEEQSKSKKKEQQAAADTGNSSQVSQNYPIVQNLQGQMVHQAISPRTLNAWVKVIEEKAFSPEVIPMFTALSEGATPQDLNTMLNTVGGHQAAMQMLKETINEEAAEWDRLHPVHAGPIAPGQMREPRGSDIAGTTSTLQEQIGWMTSNPPVPVGEIYKTWIILGLNKIVRMYSPVSILDIRQGPKEPFRDYVDRFYKTLRAEQASQEVKNWMTETLLIQNSNPDCKTILKALGPGATLEDMMTACQGVGGPGHKARVLAEAMSQMTNSATIMMQKGNFRSQGKIVKCFNCGKQGHIARNCRAPRKKGCWRCGKEGHQMKECTEGQANFLGKIWPSHKGRPGNFLQSRPEPTAPPEESFRSGEETTSPSQKQETIDKTLYPSASLRSLFGNDPSSQ

SEQ ID NO: 56 - protein, 503 aa, Human immunodeficiency virus
MGARASVLSGGELDRWEKIRLRPGGKKKYRLKHIVWASRELERFAVIPGLLETAEGCKQILEQLQPSLRTGSEELKSLFNTIAVLFCVHQRIEVKDTKEALDKIEEEKNKSKKRAQQAAADTGNSSQVSSQVSQNYPIVQNLQGQMVHQPITPRTLNAWVKVVEEKSFSPEVIPMFSALSEGATPQDLNTMLNTIGGHQAAMQMLKETINEEAAEWDRLHPVHAGPIAPGQMREPRGSDIAGTTSTLQEQIGWITHNPPIPVGEIYKRWIILGLNKIVRMYSPVSILDIRQGPKEPFRDYVDRFYKTLRAEQASQDVKNWMTETLLVQNANPDCKTILKALGPAATLEEMMTACQGVGGPGHKARVLAEAMSQVTNPPTIMMQRGNFRNQGRIVKCFNCGKEGHIAKNCRAPRKKGCWKCGKEGHQMKDCTERQANFLGKIWPSHKGRPGNFLQSRPEPTAPPEESFRFGEETTPSQKQEQIDKELYPSASLKSLFGNDPSSQ

SEQ ID NO: 57 - protein, 501 aa, Human immunodeficiency virus
MGARASVLSGGKLDKWEKIRLRPGGKKQYRLKHIVWASRELERFALNPGLLETAEGCKQILEQLQPALRTGTEELRSLNNTVAVLYCVHRQIEVRDTKEALDKIEEEQNKSKKKAQQAEADTGNSRQVSQNYPIVQNLQGQMVHQAISPRTLNAWVKVVEEKAFSPEVIPMFSALSEGATPQDLNTMLNTVGGHQAAMQMLKETINEEAAEWDRLHPVHAGPVAPGQMREPRGSDIAGTTSTLQEQIGWMTNNPPIPVGEIYKRWIIMGLNKIVRMYSPISILDIRQGPKEPFRDYVDRFYKTLRAEQASQEVKNWMTETLLVQNANPDCKNILKALGPGATLEEMMTACQGVGGPSHKARVLAEAMGQITSSATVMMQRGNFRGQRKIVKCFNCGKEGHIARNCKAPRKRGCWKCGQEGHQMKDCTERQANFLGKIWPSHKGRPGNFPQSRLEPTAPPAESFRFGEETTTPSQKQGTMDKEHPSPLASLRSLFGNDPLSQ

SEQ ID NO: 58 - protein, 507 aa, Human immunodeficiency virus
MGARASVLSGGELDRWEKIRLRPGGKKKYRLKHVVWASRELERFAVNPGLLETSEGCRQILGQLQPSLQTGSEELRSLYNTVAVLYCVHQKIDVRDTKEALEKVEEEQNKSKEKAQTAAQKAAADTKNSSQVSQNYPIVQNIQGQMVHQPISPRTLNAWVKVVEEKAFSPEVIPMFSALSEGATPQDLNTMLNTVGGHQAAMQILKETINEEAADWDRLHPVQAGPVAPGQMREPRGSDIAGTTSTLQEQIGWMTSNPPIPVGEIYKRWIIMGLNKIVRMYSPVGILDIRQGPKEPFRDYVDRFYKTLRAEQASQDVKNWMTETLLVQNANPDCKTILKALGPAATLEEMMTACQGVGGPGHKARVLAEAMSQMTNSATIMMQKGNFRNQRKIVKCFNCGKEGHIARNCRAPRKRGCWKCGKEGHQMKDCTERQANFLGKIWPSHKGRPGNFLQNRPEPTAPPAPPEESFKFGEETTTPPQKQEPKDKELYPLTSLRSLFGNDPLSQ

SEQ ID NO: 59 - protein, 504 aa, Human immunodeficiency virus
  misc_feature (113)..(113): Xaa can be any naturally occurring amino acid
  misc_feature (130)..(130): Xaa can be any naturally occurring amino acid
  misc_feature (250)..(250): Xaa can be any naturally occurring amino acid
MGARASVLSGGKLDKWERIRLRPGGKKKYKLKHIVWASRELERFAVNPGLLETSEGCRRILGQLQPSLQTGSEELKSLYNTIATLCCVHQGIEVKDTKEALDKIEEEQNKSKXKTQQAAAAADTGNSGQXSQNYPIVQNLQGQMVHQAISPRTLNAWVKVVEEKAFSPEVIPMFSALSEGATPQDLNTMLNTVGGHQAAMQMLKETINEEAAEWDRLHPVHAGPVAPGQMREPRGSDIAGTTSTLQEQIXWMTNNPPIPVGEIYKRWIIMGLNKIVRMYSPTSILDIKQGPKEPFRDYVDRFYKTLRAEQATQEVKNWMTETLLVQNANPDCKTILKALGPAATLEEMMTACQGVGGPGHKARVLAEAMSQVTNSTAIMMQKGNFRNQRKIVKCFNCGKEGHIARNCRAPRKKGCWKCGKEGHQMKDCTERQANFLGKIWPSHKGRPGNFLQSRPEPTAPPEESFRFGEETTTPPQKQKQEPVDKELYPLASLRSLFGNDPSSQ

SEQ ID NO: 60 - protein, 501 aa, Human immunodeficiency virus
MGARASVLSGGELDKWERIRLRPGGKKKYQLKHIVWASRELERFSINPGLLETSEGCRQILRQLQPSLQTGSEELKSLFNTVATLYCVHQKIDVKDTKEALEKIEEEQNKSKKKAQQAEADTGSNNQVSQNYPIVQNLQGQMVHQAISPRTLNAWVKVIEEKAFSPKVIPMFSALSEGATPQDLNTMLNTVGGHQAAMQMLKETINEEAAEWDRLHPVHAGPAAPGQMREPRGSDIAGTTSTLQEQIGWMTSNPPIPVGEIYKRWIILGLNKIVRMYSPVSILDIRQGPKEPFRDYVDRFYKTLRAEQASQDVKNWMTETLLVQNANPDCKTILKALGPAATLEEMMTACQGVGGPGHKARILAEAMCQVTNANTIMMQRGNFKNQRKTVKCFNCGKEGHIARNCRAPRKKGCWKCGGEGHQMKDCTERQANFLGKIWPSHKGGRPGNFLQSRPEPTAPPEESFRFGEETTTPSQKQEPINKELYPLASLRSLFGNDPSSQ

SEQ ID NO: 61 - protein, 504 aa, Human immunodeficiency virus
MGARASVLSGGDLDRWEKIRLRPGGKKKYQLKHIVWASRELERFAINPGLLETSEGCRQIMSQLQSSLQTGSEELRSLYNTVATLYCVHQKIDVKDTKEALDIVEEEQNKSKKKAQQAAADTGNSSSQVSQNYPIVQNLQGQMVHQALSPRTLNAWVKVVEEKAFSPEVIPMFSALSEGATPQDLNTMLNTVGGHQAAMQMLKETINEEAAEWDRLHPAQAGPVQPGQIRDPRGSDIAGTTSTLQEQIAWMTHNPPIPVGEIYKRWIILGLNKIVRMYSPSSILDIKQGPKEPFRDYVDRFYKTLRAEQASQEVKNWMTETLLVQNSNPDCKTILKALGPGATLEEMMTACQGVGGPSHKARVLAEAMSQVNNSASVMMQKGNFKNQKRTVKCFNCGKVGHIARNCRAPRRKGCWKCGKEGHQMKECSEKQANFLGKVWPSHKGRPGNFLQSRPEPTAPPAPSEESFRFGEETAAPPQKQEPIDQGLYPLASLRSLFGNDPSSQ

SEQ ID NO: 62 - protein, 510 aa, Human immunodeficiency virus
MGARASVLSGGELDRWEKIRLRPGGKKKYRLKHIVWASRELERFAVNPGLLETSEGCRKILGQLQPSLQTGSEELKSLFNTVATLYCVHQKIDVKDTKEALDRIEEEQNKSKKKAQPAAAAADTGNNSQVSQNYPIVQNLQGQMVHQALSPRTLNAWVKVVEEKAFSPEVIPMFTALSEGATPQDLNTMLNTVGGHQAAMQMLKETINEEAAEWDRLHPVQAGPIAPGQIREPRGSDIAGTTSNLQEQIAWMTNNPPIPVGEIYKRWIILGLNKIVRMYSPTSILDIKQGPKEPFRDYVDRFYKTLRAEQASQEVKNWMTETLLVQNANPDCKTILKALGPGATLEEMMTACQGVGGPGHKARVLAEAMSQVNSATIMMQKGNFRNQRKTVKCFNCGKEGHIARNCRAPRKRGCWKCGKEGHQMKDCTERQANFLGKIWPSHKGRPGNFLQSRPEPTAPPEESFRFGEETATPSQKQEPATPSQKQEQIDKELYPLTSLRSLFGNDPSSQ

SEQ ID NO: 63 - protein, 506 aa, Human immunodeficiency virus
MGARASVLSGGKLDAWEKIRLRPGGKKKYRLKHLVWASRELERFAVNPSLLETPEGCKQILVQLQPSLQTGSEELKSLYNTVATLYCVHSRIEVKDTKEALDKIEEEQNKSKKRTQQAAAADTGNSSQGSQVSHNYPIVQNLQGQMVHQAISPRTLNAWVKVIEEKAFSPEVIPMFSALSEGATPQDLNTMLNTVGGHQAAMQMLKETINEEAAEWDRLHPVHAGPIAPGQMREPRGSDIAGTTSTLQEQIGWMTNNPPIPVGEIYKRWIILGLNKIVRMYSPVCILDIRQGPKEPFRDYVDRFYKTLRAEQASQDVKNWMTETLLVQNSNPDCKTILKALGPAATLEEMMTACQGVGGPGHKARVLAEAMSHVTNPTNIMMQGGNFRSQKKMVKCFNCGKVGHIAKNCRAPRKRGCWKCGKEGHQMKDCNERQGQANFLGKIWPSYKGRPGNFLQNRTEPTAPPEEIFRFGEETTTPSQKQGPMDKEQYPLTSLRSLFGSDPSSQ

SEQ ID NO: 64 - protein, 500 aa, Human immunodeficiency virus
MGARASVLSGGELDRWEKIRLRPGGKKQYKLYHIVWASREIEGLAVNPGLLETSEGCREILGQLHPSLQTGSEEFKSLYNTVAVLYCVHQRIDVKDTKEALDKIEEEQNKSKKKAQQAAADTGNSSNSSQVSQNYPIVQNLQGQMVHQALSPRTLNAWVKVVEEKAFSPEVIPMFSALSEGATPQDLNTMLNTVGGHQAAMQILKETINEEAAEWDRLHPVHAGPIAPGQMREPRGSDIAGTTSTLQEQIGWMTNNPPIPVGEIYKKWIIMGLNKIVRMYSPVSILDIRQGPKEPFRDYVDRFYKTLRAEQASQEVKNWMTETLLVQNANPDCKTILKALGPGATLEEMMTACQGVGGPGHKARVLAEAMSQVTNPATIMIQKGNFRNQRKTVKCFNCGKEGHIAKNCRAPRKKGCWKCGKEGHQMKDCTERQANFLGKIWPSHKGRPGNFLQSRPEPTAPPEESFRFGEETTTPSQKQEPIDREMYPSTSLKSLFGNDP

SEQ ID NO: 65 - protein, 505 aa, Human immunodeficiency virus
  misc_feature (51)..(51): Xaa can be any naturally occurring amino acid
  misc_feature (143)..(143): Xaa can be any naturally occurring amino acid
  misc_feature (341)..(341): Xaa can be any naturally occurring amino acid
  misc_feature (397)..(397): Xaa can be any naturally occurring amino acid
  misc_feature (403)..(403): Xaa can be any naturally occurring amino acid
  misc_feature (463)..(463): Xaa can be any naturally occurring amino acid
  misc_feature (483)..(483): Xaa can be any naturally occurring amino acid
MGARASILSGGKLDKWEKIRLRPGGKKQYQLKHLVWASRELERFAVNPGLXETAQGCRQILQQLQPSLQTGTEELRSLYNTVATLYCVHQNIDVKDTKEALDRVEEEQNKSKKKAEQAAADTRSSSQVSQNYPIVQNLQGQMXHQPISPRTLNAWVKVVEEKAFSPEVIPMFSALSEGATPQDLNTMLNTVGGHQAAMQMLKETINEEAAEWDRLHPVHAGPVAPGQMREPRGSDIAGTTSTLQEQIAWMTNNPPIPVGDIYKRWIILGLNKIVRMYSPTSILDIKQGPKEPFRDYVDRFYKVLRAEQASQEVKNWMTETLLVQNANPDCKTILKALGPAXTLEEMMTACQGVGGPGHKARVLAEAMSQVTNSATIMMQKGNFRNQRKTVKCFNCGXEGHIAXNCRAPRKRGCWKCGQEGHQMKDCTERQANFLGKIWPSHKGRPGNFLQSRPEPSAPPEDSXRFAEQTATPQTATPSQKQEXIDKELYPLASLRSLFGNDPSSQ

SEQ ID NO: 66 - protein, 506 aa, Human immunodeficiency virus
MGARASVLSGGELDRWEKIRLRPGGKKKYKLKHIVWASRELERFAVNPSLLETSEGCRQILGQLQPSLQTGSEELKSLFNTVATLYCVHQRIDVKDTKEALDRIEEEQNKSKKKAQQAAAADTGNSSTGNGSKVSQNYPIVQNLQGQMVHQTLSPRTLNAWVKVIEEKAFSPEIIPMFTALSEGATPQDLNTMLNTVGGHQAAMQMLKETINEEAAEWDRLHPPQAGPVAPGQIRDPRGSDIAGTTSNLQEQIAWMTNNPPIPVGEIYKRWIILGLNKIVRMYSPVSILDIRQGPKEPFRDYVDRFYKTLRAEQASQEVKNWMTETLLVQNANPDCKTILKALGPGASLEEMMTACQGVGGPGHKARVLAEAMSQVTNSTAIMMQKGNFRNQRRTIKCFNCGKEGHLARNCRAPRKKGCWKCGKEGHQMKDCTERQANFLGKIWPSHKGRPGNFLQSRPEPTAPPEESFRFGEETTTPPQKQEPIDKEMYPLASLKSLFGNDPSSQ

SEQ ID NO: 67 - protein, 503 aa, Human immunodeficiency virus
MGARASVLSGGKLDAWEKIRLRPGGKKKYHLKHIVWASRELERFAVNPGLLETSEGCRQILQQLQPSLQTGSEELKSLYNTVAVLYCVHQRIEIKDTKEALDKIEEEQNKSKKKAQQAAADTGKSSQVSQNYPIVQNLQGQMVHQAISPRTLNAWVKVIEEKAFSPEVIPMFSALSEGATPQDLNTMLNTVGGHQAAMQMLKETINEEAAEWDRLHPVHAGPIAPGQIREPRGSDIAGTTSTLQEQITWMTNNPPIPVGEIYKRWIILGLNKIVRMYSPVSILDIRQGPKEPFRDYVDRFYKTLRAEQASQDVKNWMTETLLVQNANPDCKTILKALGPAATLEEMMTACQGVGGPGHKARVLAEAMSQINPTTVMMQRGNFRNQRKTVKCFNCGKEGHIARNCRAPRKKGCWKCGQEGHQMKDCNERQANFLGKIWPSSKGRPGNFLQSRPEPTAPPAPPEESFRFGEETTTAPSQKQEPIDKGLYPLASLRSLFGNDPSSQ

SEQ ID NO: 68 - protein, 503 aa, Human immunodeficiency virus
MGARASVLSGGELDKWEKIRLRPGGKKKYRLKHLVWASRELERFAVNPGLLETSEGCRQILEQLQPALRTGSEELRSVYNTVATLYCVHQKIDVKDTKEALDKIEEEQNKSKKKAQQAAAAAADTGKNSQVSQNYPIVQNLQGQMVHQAISPRTLNAWVKVVEEKAFSPEVIPMFSALSEGATPQDLNTMLNTVGGHQAAMQMLKETINEEAAEWDRLHPVHAGPIAPGQMREPRGSDIAGTTSTLQEQIGWMTNNPPIPVGEIYKRWIILGLNKIVRMYSPTSILDIRQGPKEPFRDYVDRFYKTLRAEQASQEVKNWMTETLLVQNSNPDCKTILKALGPAATLEEMMTACQGVGGPGHKARVLAEAMSNVTNSTTIMMQKGNFRNQRKPVKCFNCGKEGHIAKNCRAPRKKGCWKCGKEGHQMKDCTERQANFLGKIWPSHKGRPGNFLQSRPEPTAPPEESFRFGEEKATPSQKQEPIDKELYPLASLRSLFGNDPSSQ

SEQ ID NO: 69 - protein, 501 aa, Human immunodeficiency virus
  misc_feature (124)..(124): Xaa can be any naturally occurring amino acid
MGARASVLSGGELDRWEKIRLRPGGKKMYKLKHIVWASRELERFAVNPGLLETSEGCRQILAQLQPSLQTGSEELKSLFNAVAVLYCVHQRIDVKDTKEALDKIEEEQNKSKKKAQQAAAAADXGSSSQVSRNYPIVQNLQGQMVHQAISPRTLNAWVKVIEEKAFSPEVIPMFSALSEGATPQDLNTMLNTVGGHQAAMQMLKETINEEAAEWDRLHPVHAGPVAPGQMRDPRGSDIAGTTSTLQEQIGWMTGNPAIPVGEIYKRWIILGLNKIVRMYSPVSILDIRQGPKEPFRDYVDRFYKTLRAEQATQEVKNWMTETLLVQNANPDCKTILKALGPAATLEEMMSACQGVGGPSHKARVLAEAMSQATSAATIMMQKGNFRSQGKIKCFNCGKEGHISKNCRAPRKKGCWKCGKEGHQMKDCNERQANFLGKVWPSHKGRPGNFVQSRPEPSAPPAESFMFGEETTTPPQKQEPVDKELYPLASLKSLFGSDPSSQ

SEQ ID NO: 70 - protein, 502 aa, Human immunodeficiency virus
MGARASIISGGELDRWEKIRLRPGGNKKYRLKHLVWASRELERFAVNPGLLETSEGCRQIIGQLQPSLQTGSEELKSLYNTVATLYCVHLRIDVKDTKEALEKLEEEQNKSKKKAQQAAADTGKSSGNQVSQNYPIVQNLQGQHVHQAISPRTLNAWVKVIEEKAFSPEVIPMFSALSEGATPQDLNTMLNTVGGHQAAMQMLKDTINEEAADWDRLHPVHAGPIAPGQMREPRGSDIAGTTSTLQEQIGWMTNNPPIPVGEIYKRWIIIGLNKIVRMYSPVSILDIRQGPKEPFRDYVDRFYKTLRAEQASQDVKNWMTETLLVQNANPDCKTILKALGPAATLEEMMTACQGVGGPSHKARILAEAMSQVTNPTTIMMQRGNFRNQRRPIKCFNCGKEGHIAKNCRAPRKKGCWKCGKEGHQMKDCSERQANFLGKIWPSSKGRPGNFLQSRPEPSAPPEESFRFGEETTTPSQKQETVDKELYPLTSLKSLFGNDPSSQ

SEQ ID NO: 71 - protein, 501 aa, Human immunodeficiency virus
  misc_feature (280)..(280): Xaa can be any naturally occurring amino acid
MGARASILSGGQLDRWEKIRLRPGGKKKYRLKHLVWASRELERFAVNPGLLETLDGCRQILGQLQPALQTGSEELRSLYNTVATLYCVHGGIEVKDTKEALDKIEEEQNKSKKKAQQAAADTGNSNSSPVSQNYPIVQNLQGQMVHQPISPRTLNAWVKVVEEKAFSPEVIPMFSALSEGATPQDLNTMLNTVGGHQAAMQMLKETINEEAAEWDRLHPVHAGPVAPGQLREPRGSDIAGTTSTLQEQIAWMTNNPPIPVGDIYKRWIILGLNKIVRMYXPTSILDIKQGPKEPFRDYVDRFYKVLRAEQASQDVKNWMTETLLVQNANPDCKTILKALGPAATLEEMMTACQGVGGPSHKAKVLAEAMGQVTSSATIMMQKGNFRDQRKIVKCFNCGKTGHIARNCRAPRKKGCWKCGKEGHQMKECTERQANFLGKIWPSHKGRPGNFLQSRPEPTAPPAESFRFGEEATAPSPKPEPIDEMYPLASLKSLFGNDPSSQ

SEQ ID NO: 72 - protein, 499 aa, Human immunodeficiency virus
  misc_feature (388)..(388): Xaa can be any naturally occurring amino acid
  misc_feature (482)..(482): Xaa can be any naturally occurring amino acid
MGARASVLSGGKLDKWERIRLRPGGKKKYRLKHIVWASRELERFAVNPGLLETATGCRQILEQLQPALKTGSEELKSLFNTVATLYCVHQAIEVRDTKEALDKIEEEQNKSKNKAQQAAADAGNNNQVSQNYPIVQNLQGQMVHQAMTPRTLNAWVKVIEEKAFSPEVIPMFSALSEGATPQDLNTMLNTVGGHQAAMQMLKETINEEAAEWDRLHPVHAGPIAPGQLREPRGSDIAGTTSTLQEQIAWMTHNPPIPVGEIYKRWIILGLNKIVRMYSPSSILDIKQGPKEPFRDYVDRFYKTLRAEQASQEVKNWMTETLLVQNSNPDCKTILKALGPGATLEEMMTACQGVGGPSHKARVLAEAMSQANTTSIMMQRGNFRNQRKXVKCFNCGKEGHIAKNCRAPRKKGCWKCGKEGHQMKDCTERQANFLGKIWPSHKGRPGNFLQSRPEPTAPLEESFGFGEETITPPQKQEPIDKGXYPSVSLKSLFGNDPLSQ

SEQ ID NO: 73 - protein, 500 aa, Human immunodeficiency virus
MGARASVLSGGELDRWEKIRLRPGGKKKYRLKHIVWASRELERFAVNPGLLETSEGCRKILGQLQPSLQTGSEELKSLYNTIATLYCVHQKIEIKDTKEALDKIEEEQNKSKKKAQQAAADTGNSSSQVSQNYPIVQNIQGQMVHQPISPRTLNAWVKVVEEKAFSPEVIPMFSALSEGATPQDLNTMLNTVGGHQAAMQMLKETINEEAAEWDRVHPVHAGPIAPGQMREPRGSDIAGTTSTLQEQIEWMTHNPPIPVGEIYKRWIILGLNKIVRMYSPTSILDIRQGPKEPFRDYVDRFYKTLRAEQASQEVKNWMTETLLVQNSNPDCKTILKALGPGATLEEMMTACQGVGGPGHKARVLAEAMSQATNTNIMLQRGNFRNQRKTIKCFNCGKEGHLAKNCRAPRKKGCWKCGKEGHQMKDCTERQANFLGKIWPSLKGRPGNFLQSRLEPTAPPEESFRFGEETTTPSQKQEPTDKEVYPLTSLRSLFGNDPSST

SEQ ID NO: 74 - protein, 501 aa, Human immunodeficiency virus
MGARASVLSGGELDRWEKIRLRPGGKKKYKLKHIVWASRELERFAVNPGLLETSEGCRQILGQLQPSLQTGSEELKSLFNTIAVLYCVHQRIEVKDTKEALEKIEEEQNKSKKKVQQAAADSGNSDSQVSKNFPIVQNLQGQMVHQAISPRTLNAWVKVVEEKAFSPEVIPMFSALSEGATPQDLNTMLNTVGGHQAAMQMLKETINEEAAEWDRVHPVHAGPIAPGQMREPRGSDIAGTTSTLQEQIGWMTNNPPIPVGEIYKRWIILGLNKIVRMYSPTSILDIRQGPKEPFRDYVDRFYKTLRAEQASQDVKNWMTETLLVQNANPDCKTILKALGPAATLEEMMTACQGVGGPSHKARVLAEAMNQVTNPTSIMMQRGNFRNQRKTVKCFNCGKEGHIARNCRAPRKKGCWKCGKEGHQMKDCSERQANFLGKIWPSHKGRPGNFPQSRPEPSAPPEESFRFGEETTAPSLKQEPINKELYPLASLKSLFGNDPSSQ

SEQ ID NO: 75 - protein, 505 aa, Human immunodeficiency virus
MGARASVLSGGELDRWEKIRLRPGGKKKYRLKHIVWASRELERFAVNPGLLETASGCRQILEQLQPSLQTGSEELRSLYNTIAVLYCVHQKIEVKDTKEALDKIEEEQNKSKKKAQQAAAAAAGTGNSSQVSQNYPIVQNLQGQMVHQAISPRTLNAWVKVVEEKAFSPEVIPMFSALSEGATPQDLNTMLNTVGGHQAAMQMLKETINEEAAEWDRLHPVHAGPIAPGQMREPRGSDIAGTTSTLQEQIGWMTNNPPIPVGEIYKRWIILGLNKIVRMYSPTSILDIRQGPKEPFRDYVDRFYKTLRAEQASQEVKNWMTETLLVQNANPDCKTILKALGPAATLEEMMTACQGVGGPSHKARVLAEAMSSANSAAIMMQKGNFRNQRKTVKCFNCGKEGHIARNCRAPRKKGCWKCGKEGHQMKDCTERQANFLGKIWPSHKGRPGNFLQSRPEPTAPPAPPAESFRFGEETTTPPQKQEPIDKELYPLASLKSLFGNDPSSQ

SEQ ID NO: 76 - protein, 501 aa, Human immunodeficiency virus
MGARASILSGGKLDRWEKIRLRPGGKKQYKLIHIVWASREVERFAVNPGLLETSEGCRQILEQLQPSFQTGSEELRSLFNTIATLYCVHQNIDIKDTKEALDKIEEEQNKSKKRAQQAAAADTGNNKQVSQNYPIVQNMQGQMVHQAISPRTLNAWVKVVEEKAFSPEVIPMFAALSEGATPQDLNTMLNTVGGHQAAMQMLKETINEEAAEWDRLHPVHAGPIAPGQMREPRGSDIAGTTSTLQEQIGWMTHNPPIPVGEIYKRWIILGINKIVRMYSPTSILDIRQGPKEPFRDYVDRFYKTLRAEQASQEVKNWMTETLLVQNANPDCKTILKALGPGATLEEMMTACQGVGGPGHKARVLAEAMSQVTNPATIMIQKGNFRNQRKTVKCFNCGKEGHIAKNCRAPRKKGCWKCGKEGHQMKDCTERQANFLGKIWPSHKGRPGNFLQSRPEPTAPPEEIFRFGEETATPPQKQEPIDKELYPSASLRSLFGNDPSSQ

SEQ ID NO: 77 - protein, 503 aa, Human immunodeficiency virus
MGARASVLSGGKLDKWEKIRLRPGGKKTYKLKHIVWASRELERFAVNPGLLETAEGCRQIMGHLHPSLQTGSEELRSLYNAVATLYCVHQRIDVRDTKEALDRVEEEQNKCKKKAQQAAANTETNTGNSSQVSQNYPIVQNLQGQMVHQAISPRTLNAWVKVIEEKAFSPEVIPMFSALSEGATPADLNTMLNTVGGHQAAMQMLKETINEEAAEWDRLHPAQAGPVAPGQIREPRGSDIAGTTSTLQEQITWMTNNPPIPVGDIYKRWIILGLNKIVRMYSPTSILDIRQGPKEPFRDYVDRFYKTLRAEQASQEVKNWMTETLLVQNANPDCKTILKALGPAATLEEMMTACQGVGGPGHKARVLAEAMSHVNSAAIMMQKGNFRNQRKTVKCFNCGKEGHLARNCRAPRKKGCWKCGREGHQMKDCTERQANFLGKIWPSHKGRPGNFLQNRTEPSAPPEEIFGFGEEAAAPPQKQEPIDKEKYPLTSLRSLFGNDPSSQ

SEQ ID NO: 78 - protein, 500 aa, Human immunodeficiency virus
MGARASVLSGGKLDKWEKIRLRPGGKKKYKLKHIVWASRELERFAVNPGLLETSEGCRQILGQLQPALQTGSEELRSLYNTVATLYCVHQRIEVKDTKEALERIEEEQNKSKKKAQQAAANTGNSSQVSQNYPIVQNIQGQMVHQAISPRTLNAWVKVVEEKAFSPEVIPMFSALSEGATPQDLNTMLNTVGGHQAAMQMLKETINEEAAEWDRLHPVHAGPIAPGQMREPRGSDIAGTTSTLQEQIGWMTNNPPIPVGEIYKRWIILGLNKIVRMYSPSSILDIRQGPKEPFRDYVDRFYKTLRAEQASQDVKNWMTETLLVQNANPDCKTILKALGPAATLEEMMTACQGVGGPGHKARVLAEAMSQVTNSGTIMMQRGNLRNQRKIVKCFNCGREGHIAKNCRAPRRRGCWKCGKEGHQMKDCTERQANFLGKIWPSYKGRPGNFLQSRPEPTAPPEESFRFGEETTTPSQKQEPIDKELYPLASLRSLFGNDPSSQ

SEQ ID NO: 79 - protein, 506 aa, Human immunodeficiency virus
MGARASVLSGGELDRWEKIRLRPGGKKKYKLKHIVWASRELERFAVNPGLLETSGGCRQILGQLQPSLQTGSEELRSLYNTVATLYCVHQKIDVKDTKEALEKIEEEQNKSKKKAQQAAADTGNSSQVSQNYPIVQNIQGQMVHQAISPRTLNAWVKVVEEKAFSPEVIPMFSALSEGATPQDLNTMLNTVGGHQAAMQMLKETINEEAAEWDRLHPVHAGPIAPGQMREPRGSDIAGTTSTLQEQIGWMTNNPPIPVGEIYKRWIILGLNKIVRMYSPSSILDIKQGPKEPFRDYVDRFYKTLRAEQASQEVKNWMTETLLVQNSNPDCKTILKALGPAATLEEMMTACQGVGGPAHKARVLAEAMSQVTNSATIMMQKGNFRNQRKAVKCFNCGKEGHIAKNCRAPRKKGCWKCGREGHQMKDCTERQANFLGKIWPSHKGRPGNFLQSRPEPTAPSAPPAESFRFGEEITTPPQKQETLIDLDKELYPSASLKSLFGNDPLLK

SEQ ID NO: 80 - protein, 503 aa, Human immunodeficiency virus
MGARASVLSGGELDRWEKIRLRPGGKKKYRLKHIVWASRELERFAVNPGLLETSEGCRQILGQLQPSLQTGSEELRSLFNTVATLYCVHQRIDVKDTKEALEKIEEEQNKSKEKAQQAAAAADTGNSKQVVSQNYPIVQNVQGQMVHQPLSPRTLNAWVKVVEERAFSPEVIPMFTALSEGATPQDLNTMLNTIGGHQAAMQMLKETINEEAAEWDRLHPVHAGPIAPGQMREPRGSDIAGTTSNLQEQIAWMTNNPPIPVGEIYKRWIILGLNKIVRMYSPTSILDIRQGPKEPFRDYVDRFYKTLRAEQASQEVKNWMTETLLVQNANPDCKHILKALGPAATLEEMMTACQGVGGPSHKARVLAEAMSQVTSSTTIMMQRGNFKNQRKIVKCFNCGKEGHIARNCRAPRKRGCWKCGKEGHQMKDCTERQANFLGKIWPSHKGRPGNFLQNRPEPSAPPEESFRCGEETTTPSQKQETIDKDLYPLTSLRSLFGSDPSSQ

SEQ ID NO: 81 - protein, 504 aa, Human immunodeficiency virus
MGARASVLSGGELDRWEKIRLRPGGKKKYKLKHIIWASRELERFAVNPGLLETSEGCRQILGQLQPSLQTGSEEFRSLYNAIAVLYCVHQRIDVKDTKEALEKVEEEQNKSKKKVQQAAAATAAAGNSSQVSQNYPIVQNMQGQMVHQAISPRTLNAWVKVVEEKAFSPEVIPMFAALSEGATPQDLNLMLNTVGGHQAAMQMLKETINEEAADWDRLHPAQAGPVAPGQIREPRGSDIAGTTSTLQEQITWMTSNPPIQVGEIYKRWIILGLNKIVRMYSPTSILDIKQGPKEPFRDYVDRFYRTLRAEQASQEVKNWMTETLLVQNSNPDCKTILKALGPAATLEEMMTACQGVGGPGHKARVLAEAMSQLTNTTNIMMQKGNFRNQRRSIKCFNCGKEGHTAKNCRAPRKKGCWKCGKEGHQMKDCTERQANFLGKIWPSHKGRPGNFLQSRPEPSAPPEEIFRFGEETTTNPSQKQEMVDKELYPLASLKSLFGNDPSSQ

SEQ ID NO: 82 - protein, 506 aa, Human immunodeficiency virus
MGARASVLSGGKLDKWEKIRLRPGGKEKYRLKHIVWASRELERFAVNPGLLETSEGCRQILGQLQPSLQTGSEELRSLYNTVATLYCVHQGIEVGDTKEALDKIEEEQNKSKKKAQQVAAAQPAAAVTGNSNQISQNYPIVQNLQGQMVHQAISPRTLNAWVKVVEEKAFSPEVIPMFAALSEGATPQDLNTMLNTVGGHQAAMQMLKETINEEAAEWDRLHPVHAGPIAPGQMREPRGSDIAGTTSTLQEQIAWMTNNPAIPVGEIYKKWIIMGLNKIVRMYSPASILDIRQGPKEPFRDYVDRFYKTLRAEQASQEVKNWMTETLLVQNANPDCKTILKALGPAATLEEMMTACQGVGGPGHKARVLAEAMSQATNQATIMMQKGNFRNQRKTVKCFNCGKEGHIARNCRAPRKKGCWKCGKEGHQMKDCTERQVNFLGKIWPSHKGRPGNFLQSRLEPTAPPAESFRFGEETATPSQKQETIDKELYPLASLKSLFGNDPSSQ

SEQ ID NO: 83 - protein, 507 aa, Human immunodeficiency virus
MGARASVLSGGELDKWEKIRLRPGGKKKYQLKHIVWASRELERFAVNPGLLETSEGCRQIIKQLQPSLQTGSEELKSLYNTVAVLYCVHQKIEIKDTKEALEKIEEEQNKSKKKAQQAAADTGNSSQVSQNYPIVQNMQGQMVHQALSPRTLNAWVKVIEEKAFSPEVIPMFTALSEGATPQDLNTMLNTVGGHQAAMQMLKETINEEAAEWDRVHPVHAGPVAPGQMREPRGSDIAGTTSTLQEQIGWMTNNPPIPVGEIYKRWIILGLNKIVRMYSPVSILDIRQGPKEPFRDYVDRFYKTLRAEQATQDVKNWMTETLLVQNANPDCKTILKALGPGASLEEMMTACQGVGGPGHKARVLAEAMSQVTTPPAIMMQRGNFRNPRKVVKCFNCGKEGHIAKNCRAPRKRGCWKCGKEGHQMKDCTERQANFLGKIWPSSKGRPGNFLQSRPEPTAPPEPTAPPAASFRFGEETTTPPQKQEPPVDRELYPLASLKSLFGNDPSSQ

SEQ ID NO: 84 - protein, 499 aa, Human immunodeficiency virus
MGARASVLSGGELDKWEKIRLRPGGKKKYQLKHIVWASRELERFAVNPGLLETSEGCRQILGQLQPSLRTGSEELKSLFNTVAVLYCVHQKIDVKDTKEALDKIEEEQNKSNKKAQQAAADTGNRSQASQNYPIVQNLQGQMVHQPISPRTLNAWVKVIEEKAFSPEVIPMFTALSEGATPQDLNTMLNTVGGHQAAMQMLKETINEEAAEWDRLHPVQAGPIAPGQIREPRGSDIAGTTSNLQEQITWMTSNPPIPVGEIYKRWIILGLNKIVRMYSPVSILDIRQGPKEPFRDYVDRFYKTLRAEQATQEVKNWMTETLLVQNANPDCKNILKALGPAATLEEMMTACQGVGGPSHKARVLAEAMSQAQTSTAMMMQGSNHRNQRKIVKCFNCGKVGHIARNCRAPRKKGCWKCGREGHQMKDCTERQANFLGKIWPSHKGRPGNFLQSRPEPTAPPEESFRFGEETTNPPQKQEPIDELYPMASLKSLFGNDPSSQ

SEQ ID NO: 85 - protein, 500 aa, Human immunodeficiency virus
MGARASVLSGGQLDKWERIRLRPGGKKKYQLKHIVWASRELERFAVNPGLLETSEGCRQILRQLQPSLQTGSEELKSLYNTVATLYCVHQKIDVKDTKEALEKIEEEQNKSKKKAQQAAADTGNSSQVSQNYPIVQNMQGQMVHQAISPRTLNAWVKVIEEKAFSPEIIPMFSALSEGATPQDLNTMLNTVGGHQAAMQMLKETINEEAAEWDRLHPVQAGPVAPGQMREPRGSDIAGTTSTLQEQIGWMTNNPPIPVGEIYKRWIILGLNKIVRMYSPVSILDIRQGPKESFRDYVDRFYKTLRAEQASQDVKNWMTETLLVQNANPDCKTILKALGPGATLEEMMTACQGVGGPSHKARVLAEAMSQMTPPPTVMMQRGNFRGQRKVVKCFNCGKEGHIAKNCRAPRKRGCWKCGKEGHQMKDCTERQANFLGKIWPSYKGRPGNFLQSRPEPTAPPEESFKFGGETTTPPQKQETVDKDLYPLASLRSLFGNDPSSQ

SEQ ID NO: 86 - protein, 502 aa, Human immunodeficiency virus
MGARASVLSGGELDRWEKIRLRPGGKKQYKLKHIVWASRELERFAVNPGLLETSEGCKQILEQLQPALRTGSEEFRSLYNTIAVLYCVHQRIGVKDTKEALDKIEEEQNKSKKKAQQVAADTENKSQVSQNYPIVQNIQGQMVHQPISPRTLNAWVKVVEEKAFSPEVIPMFSALSEGATPQDLNTMLNTVGGHQAAMQMLKETINEEAAEWDRVHPVHAGPVAPGQMREPRGSDIAGTTSTLQEQIGWMTNNPPIPVGEIYKRWIILGLNKIVRMYSPTSILDIRQGPKEPFRDYVDRFYKTLRAEQASQDVKNWMTETLLVQNANPDCKTILKALGPAATLEEMMTACQGVGGPGHKARVLAEAMSQVTNSATIMMQKGNFRNQRKSVKCFNCGKEGHIARNCRAPRKKGCWKCGREGHQMKDCTERQANFLGKIWPSHKGRPGNFPQSRTEPTAPPEESFRFGEETTTPSQKQGQGPIDKELYPLTSLRSLFGNDPSSQ

SEQ ID NO: 87 - protein, 500 aa, Human immunodeficiency virus
MGARASVLSGGQLDRWEKIRLRPGGKKKYKLKHLVWASRELERFAVNPGLLETSEGCRQILGQLQPALQTGSEEFRSLYNTIATLYCVHQQIEVKDTKEALDKIEEEQNKSKKKAQQTAAGTGNSSQVSQNYPIVQNIQGQMVHQPISPRTLNAWVKVVEEKAFSPEVIPMFSALSEGATPQDLNTMLNTMGGHQAAMQMLKETINEEAADWDRLHPVQAGPVAPGQMREPRGSDIAGTTSALQEQIGWMTSNPPIPVGEIYKRWIILGLNKIVRMYSPTSILDIRQGPKEPFRDYVDRFYKTLRAEQASQEVKNWMTETLLVQNANPDCRTILKALGPAATLEEMMTACQGVGGPGHKARVLAEAMSQATNSATIMMQKGNFRNQRKTVKCFNCGKDGHIAKNCRAPRKKGCWKCGKEGHQMKDCTERQANFLGKSWPSHKGRPGNFLQSRPTPSAPPEESFRFGEETATPSQRPESIDKEMYPLTSLRSLFGNDPSSQ

SEQ ID NO: 88 - protein, 497 aa, Human immunodeficiency virus
MGARASVLSGGELDKWEKIRLRPGGKKQYKLKHIVWASRELERFAVNPGLLETSEGCRQILRQLQPSLQTGSEELKSLFNTVATLYCVHQRIEVKDTKEALDKIEEEQNKSKKKAQTAAADTGNNSQVSQNYPIVQNLQGQMVHQAISPRTLNAWVKVVEEKAFSPEVIPMFSALSEGATPQDLNTMLNTVGGHQAAMQMLKETINEEAAEWDRVHPVHAGPVAPGQMREPRGSDIAGTTSTLQEQIGWMTNNPPIPVGEIYKRWIILGLNKIVRMYSPTSILDIRQGPKEPFRDYVDRFYKTLRAEQASQEVKNWMTETLLIQNANPDCKTILKALGPGATLEEMMTACQGVGGPGHKARVLAEAMSQVTNSTAIMMQRGNFRNQRKNIKCFNCGKEGHIAKNCRAPRKKGCWKCGKEGHQMKDCTERQANFLGKIWPSHKGRPGNFLQSRPEPTAPPEESFRFGEETTTPSQKQEPKDKELYPLASLKSLFGNDP

SEQ ID NO: 89 - protein, 507 aa, Human immunodeficiency virus
MGARASVLSGGKLDQWEKIRLRPGGRKKYKLKHIVWASRELERFAVNPGLLETSEGCRQILEQLQPALKTGSEELKSLYNTVATLYCVHQRIDVKDTKEALDRIEEEQNKSKKAAQPAAAAAAAGNSSQVSQNYPIVQNLQGQMVHQAISPRTLNAWVKVVEEKAFNPEVIPMFAALSEGATPQDLNTMLNTVGGHQAAMQMLKETINDEAAEWDRTHPVHAGPIAPGQMREPRGSDIAGTTSTLQEQIAWMTNNPPIPVGEIYKKWIILGLNKIVRMYSPTSILDIKQGPKEPFRDYVDRFYKTLRAEQATQEVKNWMTETLLVQNANPDCKTILKALGPAATLEEMMTACQGVGGPGHKARVLAEAMSQVTNSTAIMMQRGNYKGQRKAVKCFNCGKEGHIARNCRAPRKKGCWKCGKEGHQMKDCTERQANFLGKIWPSHKGRPGNFLQNRPEPTAPVEPTAPPEESFRFGEGTTPSLKQEPTDKELYPLTSLKSLFGNDPSSQ

SEQ ID NO: 90 - protein, 498 aa, Human immunodeficiency virus
  misc_feature (127)..(127): Xaa can be any naturally occurring amino acid
  misc_feature (413)..(413): Xaa can be any naturally occurring amino acid
MGARASVLSGGELDRWEKIRLRPGGKKKYRLKHIVWASRELERFALNPGLLETSEGCRQILGQLQPALQTGSEEIKSLYNTVATLYCVHQKKEVRDTKEALDKIEEEQNKSKKKAQQAAAGTGNSSXTSQNYPIVQNLQGQMVHQSLSPRTLNAWVKVVEEKAFSPEVIPMFSALSEGATPQDLNTMLNTVGGHQAAMQMLKETINEEAAEWDRLHPVHAGPIAPGQMREPRGSDIAGTTSTLQEQIGWMTNNPPIPVGEIYKRWIIMGLNKIVRMYSPTSILDIRQGPKEPFRDYVDRFYKTLRAEQASQEVKNWMTETLLVQNANPDCKTILKALGPAATLEEMMTACQGVGGPGHKARVLAEAMSQVTNPVNIMMQKGNFRNQRKTIKCFNCGKEGHLARNCRAPRKRGXWKCGKEGHQMKDCTENQANFLGKIWPSHKGRPGNFLQSRPEPTAPPEESFRFGEETATPSQKQESIDKYPLTSLRSLFGNDPSSQ

SEQ ID NO: 91 - protein, 500 aa, Human immunodeficiency virus
MGARASVLSGGELDRWEKIRLRPGGRKKYKLKHIVWASRELERFAVNPGLLETSEGCRQILEQLQPSLQTGSEELKSLFNTVATLYCVHQKIDVKDTKEALEKIEEEQNKSKKRAQQAAADTKNNSQVSQNYPIVQNLQGQMVHQAISPRTLNAWVKVVEEKAFSPEVIPMFSALSEGATPQDLNTMLNTVGGHQAAMQMLKETINEEAAEWDRLHPVQAGPVAPGQMRDPRGSDIAGTTSTLQEQVGWMTSNPPIPVGEIYKRWIILGLNKIVRMYSPTSILDIKQGPKEPFRDYVDRFYKILRAEQASQEVKNWMTETLLVQNANPDCKTILKALGPAATLEEMMTACQGVGGPGHKARVLAEAMSQVTNSASIMMQRGNFRNQKRPVKCFNCGKEGHIAKNCRAPRKKGCWKCGKEGHQMKDCTERQANFLGKIWPSHKGRPGNFLQSRPEPTAPPEESFRFGEETAAPSQKQEPIDKETYPLASLRSLFGNDPSSQ

SEQ ID NO: 92 - protein, 500 aa, Human immunodeficiency virus
MGARASVLSGGQLDRWEKIRLRPGGKKQYKLKHIVWASRELERFAVNPGLLETSEGCRQILGQLQPSLQTGSEELKSLFNTIAVLYCVHQRIEVKDTKEALDKIEEEQNKSKKKAQQAAADTEKSSQVSQNYPIVQNMQGQMVHQAISPRTLNAWVKVVEEKAFSPEVIPMFSALSEGATPQDLNTMLNTVGGHQAAMQMLKETINEEAAEWDRLHPVHAGPVAPGQMREPRGSDIAGTTSTLQEQIGWMTNNPPIPVGEIYKRWIIMGLHKIVRMYSPTSILDIRQGPKEPFRDYVDRFYKTLRAEQASQEVKNWMTETLLVQNANPDCKTILKALGPAATLEEMMTACQGVGGPGHKARVLAEAMSHVTNSATIMMQKGNFKNQRKTVKCFNCGKEGHIARNCRAPRKRGCWKCGKEGHQMKDCNERQANFLGKIWPSHKGRPGNFLQSRPEPTAPPEESFRFGEETATPPQKQEPRDKELYPLASLKSLFGNDPSSQ

SEQ ID NO: 93 - protein, 500 aa, Human immunodeficiency virus
  misc_feature (28)..(28): Xaa can be any naturally occurring amino acid
  misc_feature (46)..(46): Xaa can be any naturally occurring amino acid
  misc_feature (84)..(84): Xaa can be any naturally occurring amino acid
  misc_feature (88)..(88): Xaa can be any naturally occurring amino acid
  misc_feature (94)..(94): Xaa can be any naturally occurring amino acid
  misc_feature (138)..(138): Xaa can be any naturally occurring amino acid
  misc_feature (215)..(215): Xaa can be any naturally occurring amino acid
  misc_feature (243)..(243): Xaa can be any naturally occurring amino acid
  misc_feature (306)..(306): Xaa can be any naturally occurring amino acid
  misc_feature (337)..(337): Xaa can be any naturally occurring amino acid
  misc_feature (394)..(394): Xaa can be any naturally occurring amino acid
  misc_feature (421)..(421): Xaa can be any naturally occurring amino acid
  misc_feature (426)..(426): Xaa can be any naturally occurring amino acid
  misc_feature (478)..(478): Xaa can be any naturally occurring amino acid
MGARASVLSGGELDRWEKIRLRPGGKKXYKLKHIVWASRELERFAXNPGLLETSKGCRQILEQLQPSLQTGSEELKSLYNTIAXLYCXHQRIEXKDTKEALDKIEEEQNKSKKMAQQAAADTGNNKQVSQNYPIVQNXQGQMVHQAISPRTLNAWVKVIEEKAFSPEVIPMFSALSEGATPGDLNTMLNTVGGHQAAMQMLKETINEEAAEWDRXHPVHAGPVAPGQMREPRGSDIAGTTSTXQEQIAWMTANPPIPVGDIYKRWIILGLNKIVRMYSPTSILDIKQGPKEPFRDYVDRFYKTLRXEQASQEVKNWMTETLLVQNANPDCKTILKAXGPAATLEEMMTACQGVGGPGHKARVLAEAMSQVTNSATIMMQRGNFRNQRKTVKCFXCGKEGHIAKNCRAPRKKGCWKCGREGXQMKDXTERQANFLGKIWPSHKGRPGNFLQSRPEPTAPPEESFRCGEETTTPSQKQEXIDKEMYPLASLRSLFGNDPSSQ

SEQ ID NO: 94 - protein, 500 aa, Human immunodeficiency virus
MGARASVLSGGELDRWEKIRLRPGGKKKYKLKHIVWASRELERFAVNPGLLETSEGCRQILGQLQPALQTGSEELKSLYNTVAVLYCVHQKIEVKDTKEALEKIEEEQNKSKKKAQQAAANTGNGSPVSQNYPIVQNIQGQMVHQAISPRTLNAWVKVVEEKAFSPEVIPMFSALSEGATPQDLNTMLNTVGGHQAAMQMLKETINEEAAEWDRLHPVQAGPVAPGQMREPRGSDIAGTTSTLQEQIGWMTNNPPIPVGEIYKRWIILGLNKIVRMYSPASILDIRQGPKEPFRDYVDRFYKTLRAEQASQEVKNWMTETLLVQNANPDCKTILKALGPGATLEEMMTACQGVGGPGHKARVLAEAMSQVTNSATIMVQRGNFRNQRKTVKCFNCGKEGHIAKNCRAPRKKGCWKCGREGHQMKDCTERQANFLGKIWPSHKGRPGNFLQSRPEPTAPPEESFRFGEETTTPSQKQGTIDKELYPLASLRSLFGNDPSSQ

SEQ ID NO: 95 - protein, 500 aa, Human immunodeficiency virus
  misc_feature (106)..(106): Xaa can be any naturally occurring amino acid
  misc_feature (113)..(113): Xaa can be any naturally occurring amino acid
  misc_feature (120)..(120): Xaa can be any naturally occurring amino acid
  misc_feature (124)..(124): Xaa can be any naturally occurring amino acid
  misc_feature (175)..(175): Xaa can be any naturally occurring amino acid
  misc_feature (185)..(185): Xaa can be any naturally occurring amino acid
  misc_feature (202)..(202): Xaa can be any naturally occurring amino acid
  misc_feature (213)..(213): Xaa can be any naturally occurring amino acid
  misc_feature (250)..(250): Xaa can be any naturally occurring amino acid
  misc_feature (263)..(263): Xaa can be any naturally occurring amino acid
  misc_feature (266)..(266): Xaa can be any naturally occurring amino acid
  misc_feature (273)..(273): Xaa can be any naturally occurring amino acid
  misc_feature (282)..(282): Xaa can be any naturally occurring amino acid
  misc_feature (377)..(377): Xaa can be any naturally occurring amino acid
  misc_feature (391)..(391): Xaa can be any naturally occurring amino acid
  misc_feature (481)..(481): Xaa can be any naturally occurring amino acid
MGARASVLSGGKLDKWEKIRLRPGGKKKYKLKHIVWASRELERFAVNPGLLETAEGCRQILGQLQPSLQTGSEELKSLFNTVATLYCVHQNIDIKDTKEALDKVEXEQNQSKXKAQQAAXAADXRNSCQVSQNYPIVQNLQGQMVHQALSPRTLNAWVKVVEEKAFSPEVIPMFXALSEGATPQXLNTMLNTVGGHQAAMQXLKETINEEAAXWDRLHPVQAGPVAPGQLREPRGSDIAGTTSTLQEQIXWMTHNPPIPVGEXYKXWIIMGLXKIVRMYSPXSILDIRQGPKEPFRDYVDRFYKTLRAEQASQEVKNWMTETLLVQNANPDCKTILKALGPGATLEDMMTACQGVGGPGHKARVLAEAMSQVTNSAXVMMQKGNFRNQRKXVKCFNCGKEGHIARNCRAPRKKGCWKCGKEGHQMKDCTERQANFLGKIWPSHKGRPGNFPQSRLEPTAPPEESFRFGEETTTPPQKQGSXDKNPLTSLRSLFGNDPSSQ

SEQ ID NO: 96 - protein, 500 aa, Human immunodeficiency virus
  misc_feature (12)..(12): Xaa can be any naturally occurring amino acid
  misc_feature (40)..(40): Xaa can be any naturally occurring amino acid
  misc_feature (65)..(65): Xaa can be any naturally occurring amino acid
  misc_feature (118)..(118): Xaa can be any naturally occurring amino acid
  misc_feature (138)..(138): Xaa can be any naturally occurring amino acid
  misc_feature (188)..(188): Xaa can be any naturally occurring amino acid
  misc_feature (226)..(226): Xaa can be any naturally occurring amino acid
  misc_feature (270)..(270): Xaa can be any naturally occurring amino acid
  misc_feature (319)..(319): Xaa can be any naturally occurring amino acid
  misc_feature (376)..(376): Xaa can be any naturally occurring amino acid
  misc_feature (443)..(443): Xaa can be any naturally occurring amino acid
  misc_feature (446)..(446): Xaa can be any naturally occurring amino acid
  misc_feature (469)..(469): Xaa can be any naturally occurring amino acid
  misc_feature (473)..(473): Xaa can be any naturally occurring amino acid
  misc_feature (477)..(477): Xaa can be any naturally occurring amino acid
  misc_feature (486)..(486): Xaa can be any naturally occurring amino acid
MGARASVLSGGXLDRWEKIRLRPGGKKKYKLKHIVWASRXLERFAVNPGLLETSEGCRQILGQLXPSLQTGSEELKSLFNTVATLYCVHQRIEVKDTKEALEKIEEEQNKSKEKARQXAADTGNKSQVSQNYPIVQNXQGQMVHQAISPRTLNAWVKVVEEKAFSPEVIPMFSALSEGATPQDLNTMXNTVGGHQAAMQILKETINEEAAEWDRLHPVHAGPIAPXQMREPRGSDIAGTTSTLQEQIGWMTHNPPIPVGDIYKRWIILGXNKIVRMYSPTSILDIRQGPKEPFRDYVDRFYKTLRAEQASQDVKNWMTXTLLVQNSNPDCKTILKALGPAATLEEMMTACQGVGGPGHKARVLAEAMSQVTNSATXMMQKSNFRNQRKVVKCFNCGKEGHIARNCRAPRKKGCWKCGKEGHQMKDCTERQANFLGKIWPSHKXRPXNFLQSRPEPTAPPEESFRFGEEXTTPXQKQXPIDKELYPXTSLKSLFGNDPSLQ

SEQ ID NO: 97 - protein, 497 aa, Human immunodeficiency virus
MGARASILSGGQLDRWEKIRLRPGGKKKYRLKHIVWASRELERFAVNPGLLETSEGCRKILEQLQPSLQTGSEELKSLFNTVATLYCVHQKIDVRDTKEALDKIEEEQNKCKKKAQQVTADTGNSSQVSQNYPIVQNIQGQMVHQALSPRTLNAWVKVVEEKAFSPEVIPMFTALSEGATPQDLNTMLNTVGGHQAAMQMLKETINEEAAEWDRVHPVHAGPIAPGQIREPRGSDIAGTTSTLQEQITWMTNNPPIPVGEIYKRWIILGLNKIVRMYSPTSILDIKQGPKEPFRDYVDRFYKTLRAEQASQDVKNWMTETLLVQNANPDCKTILKALGPGASLEEMMTACQGVGGPTHKARILAEAMSQATGANTIMMQRGNFRNQRKPVKCFNCGKEGHIAKNCRAPRKKGCWKCGQEGHQMKDCTERQANFLGKIWPSHKGRPGNFLQSRPEPTAPPEESFREEITPPQKQEPRDKEMYPLVSLKSLFGNDPSSQ

SEQ ID NO: 98 - protein, 501 aa, Human immunodeficiency virus
MGARASVLSGGELDRWEKIRLRPGGKKTYKLKHIVWASRELERFAVNPGLLETSVGCRQILGQLQPSLQTGSEELKSLYNTVATLYCVHQKIEIRDTKEALDKIEEEQNKSKKKAQQAAADTGNSSQVSHNYPIVQNLQGQMVHQPLSPRTLNAWVKVVEEKAFSPEVIPMFTALSEGATPQDLNTMLNTVGGHQAAMQMLKETINEEAAEWDRLHPVHAGPVAPGQMREPRGSDIAGTTSNLQEQIAWMTSNPPIPVGEIYKRWIILGLNKIVRMYSPTSILDIRQGPKEPFRDYVDRFYKTLRAEQASQDVKNWMTETLLVQNANPDCKTILKALGPAATLEDMMTACQGVGGPGHKARVLAEAMSQVTNSSATIMMQGGKFRNQRKIVKCFNCGKEGHIARNCRAPRKRGCWKCGQEGHQMKDCTERQANFLGKIWPSCKGRPGNFLQSRPEPSAPPEESFRFGEETTTPSQKQESIDKERYPLTSLRSLFGNDPLSQ

SEQ ID NO: 99 - protein, 505 aa, Human immunodeficiency virus
  misc_feature (233)..(233): Xaa can be any naturally occurring amino acid
  misc_feature (362)..(362): Xaa can be any naturally occurring amino acid
MGARASVLSGGQLDKWEKIRLRPGGKKKYQLKHIVWASRELERFAVNPGLLETSEGCRQILKQLQPSLQTGSEELKSLFNTVATLYCVHQRIDVKDTKEALDKIEEEQNKSKKKAQPAAADTGNSGQVSQNFPIVQNLQGQMVHQPLSPRTLNAWVKVVEEKAFSPEVIPMFSALSEGATPQDLNTMLNTVGGHQAAMQMLKETINEEAAEWDRLHPVHAGPIAPGQMREPRXSDIAGTTSTLQEQIGWMTHNPPIPVGEIYKRWIILGLNKIVRMYSPTSILDIRQGPKEPFRDYVDRFYKTLRAEQATQEVKNWMTETLLVQNANPDCKTILKALGPGATLEEMMTACQGVGGPGHKARXLAEAMSQVTNSATVMMQRGNFRNQRRIVKCFNCGKEGHIAKNCRAPRKKGCWKCGKEGHQMKDCTNERQANFLGKIWPSHKGRPGNFLQNRPEPRPEPTAPPEESFRFGEETATPPQKQEPTDKELYPLASLRSLFGNDHSSQ

SEQ ID NO: 100 - protein, 502 aa, Human immunodeficiency virus
  misc_feature (26)..(26): Xaa can be any naturally occurring amino acid
  misc_feature (375)..(375): Xaa can be any naturally occurring amino acid
  misc_feature (391)..(391): Xaa can be any naturally occurring amino acid
MGARASVLSGGELDRWEKIRLRPGGXKKYQLKHIVWASRELERFAVNPGLLETSEGCRQILGQLQPALQTGSEELKSLFNTVAVLYCVHQKIEVKDTKEALDKIEEEQTKSKKKAQQAAAAADTGSSSQVSQNYPIVQNIQGQMVHQAISPRTLNAWVKVVEEKAFSPEVIPMFSALSEGATPQDLNTMLNTVGGHQAAMQMLKETINEEAAEWDRLHPVHAGPIAPGQMREPRGSDIAGTTSTLQEQIGWMTNNPPIPVGEIYKRWIIMGLNKIVRMYSPTSILDIRQGPKEPFRDYVDRFYKTLRAEQASQEVKNWMTETLLVQNSNPDCKTILKALGPAATLEEMMTACQGVGGPGHKARVLAEAMSQVTNXATVMMQRGNLRNQRKXVKCFNCGKEGHIAKNCRAPRRKGCWKCGKEGHQMKDCTERQANFLGKIWPSHKGRPGNFLQSRPEPTAPPEESFRFGEETTTPSQKQETIDKERYPLTSLRSLFGNDPSSQ

SEQ ID NO: 101 - protein, 500 aa, Human immunodeficiency virus
  misc_feature (31)..(31): Xaa can be any naturally occurring amino acid
  misc_feature (46)..(46): Xaa can be any naturally occurring amino acid
  misc_feature (51)..(51): Xaa can be any naturally occurring amino acid
  misc_feature (55)..(55): Xaa can be any naturally occurring amino acid
  misc_feature (111)..(111): Xaa can be any naturally occurring amino acid
  misc_feature (114)..(114): Xaa can be any naturally occurring amino acid
  misc_feature (137)..(137): Xaa can be any naturally occurring amino acid
  misc_feature (197)..(197): Xaa can be any naturally occurring amino acid
  misc_feature (261)..(261): Xaa can be any naturally occurring amino acid
  misc_feature (283)..(283): Xaa can be any naturally occurring amino acid
  misc_feature (290)..(290): Xaa can be any naturally occurring amino acid
  misc_feature (295)..(295): Xaa can be any naturally occurring amino acid
  misc_feature (312)..(312): Xaa can be any naturally occurring amino acid
  misc_feature (329)..(329): Xaa can be any naturally occurring amino acid
  misc_feature (358)..(358): Xaa can be any naturally occurring amino acid
  misc_feature (415)..(415): Xaa can be any naturally occurring amino acid
  misc_feature (422)..(422): Xaa can be any naturally occurring amino acid
  misc_feature (425)..(425): Xaa can be any naturally occurring amino acid
  misc_feature (446)..(446): Xaa can be any naturally occurring amino acid
  misc_feature (470)..(470): Xaa can be any naturally occurring amino acid
  misc_feature (472)..(472): Xaa can be any naturally occurring amino acid
MGARASVLSGGELDRWEKIRLRPGGKKKYRXKHIVWASRELERFAXNPGLXETSXGCRQIIRQLQPSLQTGSEELRSLYNTVATLYCVHQKIEVKDTKEALEKIEEEQNKXKKXAQPAAADTGSTSQVSQNYPIVQXMQGQMVHQAISPRTLNAWVKVVEEKAFSPEVIPMFSALSEGATPQDLNTMLNTVGGHQAXMQMLKETINEEAAEWDRLHPVHAGPIAPGQMREPRGSDIAGTTSTLQEQIGWMTHNPPIPVGEXYKRWIILGLNKIVRMYSPTSIXDIRQGPXEPFRXYVDRFYKTLRAEQASQXVKNWMTETLLVQNANPXCKTILKALGPAATLEEMMTACQGVGGPGXKARILAEAMSQVTNPATIMMQRGNFRNQRKIVKCFNCGKEGHIAKNCRAPRKRGCWXCGKEGHXMKXCTERQANFLGKIWPSHKGRPXNFLQSRPEPTAPPEESFRFGEETXTXPQKQEPTDKELYPLASLRSLFGNDPSSQ

SEQ ID NO: 102 - protein, 508 aa, Human immunodeficiency virus
  misc_feature (41)..(41): Xaa can be any naturally occurring amino acid
  misc_feature (117)..(117): Xaa can be any naturally occurring amino acid
  misc_feature (122)..(122): Xaa can be any naturally occurring amino acid
  misc_feature (242)..(242): Xaa can be any naturally occurring amino acid
  misc_feature (491)..(491): Xaa can be any naturally occurring amino acid
  misc_feature (495)..(495): Xaa can be any naturally occurring amino acid
  misc_feature (506)..(506): Xaa can be any naturally occurring amino acid
MGARASILTGGELDRWEKIRLRPGGKKKYRLKHVVWASREXERFAVNPGLLETSEGCRQILGQLQPALQTGSEELRSLYNTVAVLFCVHQKIEVKDTKEALEKIEEEQNKSKNKAQXAAAAXADTGNGSKVSQNYPIVQNMQGQMVHQPISPRTLNAWVKVVEEKAFSPEVIPMFSALSEGATPQDLNTMLNTVGGHQAAMQMLKETINEEAADWDRLHPVHAGPVAPGQMREPRGSDIAGXTSTLQEQIGWMTHNPPIPVGEIYKRWIILGLNKIVRMYSPTSILDIKQGPKEPFRDYVDRFYKILRAEQASQEVKNWMTETLLVQNANPDCKTILKALGPAATLEEMMTACQGVGGPGHKARVLAEAMSQVTTASAAIMMQKGNFRTPRKTVKCFNCGKEGHIARNCRAPRKRGCWKCGKEGHQMKDCTERQANFLGKIWPSHKGRPGNFLQSRPEPTAPPEESFRFREEATTPSQKQEPIDKEIDKEXYPLXSLRSLFGNDPXSQ

SEQ ID NO: 103 - protein, 508 aa, Human immunodeficiency virus
MGARASVLSAGELDKWEKIRLRPGGKKKYRLKHIVWASRELERFAVNPGLLETSVGCRQILGQLQPSLQTGSEELRSLYNTVATLYCVHQKIEVRDTKEALEKVEEEQNKCKKKAQQAAAAADTGNSSQVSQNYPIVQNLQGQMVHQPISARTLNAWVKVVEEKAFSPEVIPMFTALSEGATPQDLNTMLNTVGGHQAAMQMLKETINEEAAEWDRLHPVHAGPIAPGQMREPRGSDIAGTTSTLQEQIAWMTNNPPVPVGEIYKRWIILGLNKIVRMYSPTSILDIRQGPKEPFRDYVDRFYKTLRAEQASQDVKNWMTETLLVQNANPDCKTILKALGPGASLEEMMTACQGVGGPSHKARVLAEAMSQATNSTAVMMQRGNFKNQRKIIKCFNCGKEGHIARNCRAPRKRGCWKCGKEGHQMKDCTERQANFLGKIWPSHKGRPGNFLQSRPEPSAPAEPSAPPAESFRFGEETATPSQKQEQIDKEMYPLASLRSLFGNDPSSQ

SEQ ID NO: 104 - protein, 504 aa, Human immunodeficiency virus
MGARASVLSGGDLDRWEKIRLRPGGKKKYKLKHIVWASRELERFAVNPGLLETSAGCRQILGQLQPSLQTGSEELKSLFNTVAVLYCVHQKIDVKDTKEALDKIEEEQNKSKKKVQQAAADTGNNSQVSQNYPIVQNLQGQMVHQAISPRTLNAWVKVIEEKAFSPEVIPMFTALSEGATPQDINTMLNTVGGHQAAMQMLKETINEEAAEWDRLHPVQAGPVAPGQMRDPRGSDIAGTTSTLQEQIAWMTSNPPIPVGEIYKKWIIMGLNKIVRMYSPTSILDIKQGPKEPFRDYVDRFYKTLRAEQATQEVKNWMTETLLVQNANPDCKTILKALGTGATLEEMMTACQGVGGPAHKARVLAEAMSQLTPATVMMQKGNFRNSRKSVKCFNCGREGHIAKNCRAPRKKGCWKCGKEGHQMKDCTERQANFLGKIWPSNKGRPGNFLQNRPEPTAPEPTAPPLESFRFGEEATAPPQRQEPIDRELYPSASLKSLFGNDPSSQ

SEQ ID NO: 105 - protein, 500 aa, Human immunodeficiency virus
MGARASVLSGGELDRWERIRLRPGGKKKYRLKHIVWASRELERFALNPGLLETSDGCRQILGQLQPSLQTGSEELRSLYNTVAVLFCVHQKIEVKDTKEAVEKIEEEQNKSKKKAQPAAADTGNSSQVSRNYPIVQNIQGQMVHQPISPRTLNAWVKVVEEKAFSPEVIPMFAALSEGATPQDLNTMLNTVGGHQAAMQMLKETINEEAAEWDRMHPVHAGPVAPGQMREPRESDIAGTTSTLQEQIGWMTNNPPIPVGEIYKKWIIMGLNKIVRMYSPTSILDIRQGPKEPFRDYVDRFYKTLRAEQASQEVKNWMTETLLVQNANPDCKTILKALGPAATLEEMMTACQGVGGPGHKARVLAEAMSQVTNSATIMMQKGNFRNSRKTVKCFNCGKEGHIAKNCRAPRKKGCWKCGKEGHQMKDCTERQANFLGKIWPSHKGRPGNFLQSRPEPTAPPEESFRFGEEITTPPQKQEPVDKEMYPLTSLKSLFGNDPSSQ

SEQ ID NO: 106 - protein, 503 aa, Human immunodeficiency virus
MGARASVLSGGELDKWEKIRLRPGGKKKYQLKHIVWASRELERFALNPGLLESAEGCRQILGQLHPSLKTGSEELKSLYNTIATLYCVHQKIDVKDTKEALDKIEEEQNKCKKKAQQAAAADTNSPVSQNYPIVQNLQGQMVHQAISPRTLNAWVKVIEEKAFSPEVIPMFSALSEGATPQDLNTMLNTVGGHQAAMQMLKETINEEAAEWDRTHPVQAGPVAPGQVREPRGSDIAGTTSTLQEQIAWMTHNPPIPVGEIYKRWIILGLNKIVRMYSPVSILDIRQGPKEPFRDYVDRFYKTLRAEQATQEVKNWMTETLLVQNANPDCKTILKALGPAATLEEMMTACQGVGGPGHKARVLAEAMSQVTNSTAIMMQRGNFKGQRKNVKCFNCGKEGHIARNCRAPRKKGCWKCGREGHQMKDCTERQANFLGKIWPSQRGRPGNFLQSRPESRPEPTAPPAESFRFGEETTTPSQKQEPIDKEMYPLASLRSLFGNDPSSQ

SEQ ID NO: 107 - protein, 507 aa, Human immunodeficiency virus
MGARASVLSGGELDKWEKIRLRPGGKKTYKLKHIVWASRELERFAVNPGLLETAEGCRQILGQLQPSLQTGSEELKSLFNAIAVLYCVHQRIDVKDTKEALDKIEEEQNKSKKKTQQAAAGTGNSTGNSSQVSQNYPIVQNMQGQMVHQAMSPRTLNAWVKVIEEKAFSPEVIPMFAALSEGATPQDLNTMLNTVGGHQAAMQMLKETINEEAAEWDRIHPVHAGPVAPGQMRKPRGSDIAGTTSTLQEQIGWMTSNPPVPVGEIYKRWIILGLNKIVRMYSPTSILDIKQGPKEPFRDYVDRFYKTLRAEQATQEVKNWMTETLLVQNANPDCKTILKALGPAATLEEMMTACQGVGGPGHKARVLAEAMSQVTSSATIMMQRGNFRNQRKTVKCFNCGREGHIARNCRAPRKKGCWKCGQEGHQMKDCTERQANFLGKIWPSHKGRPGNFLQSRPEPTVPTAPLEESFRFGEGTTTPPQKQDTIDKELYPSASLRSLFGNDPLLQ

SEQ ID NO: 108 - protein, 501 aa, Human immunodeficiency virus
MGARASVLSGGELDRWEKIWLRPGGKKKYRLKHIVWASRELERFAVNPGLLETSEGCRQILGQLQPSLQTGSEELKSLYNTVAVLYCVHQKIEIKDTKEALDKIAEEQNKCKKKTQQAAADTGNSSSQVSQNYPIVQNSQGQMVHQALSPRTLNAWVKVVEEKAFSPEVIPMFSALSEGATPHDLNTMLNTVGGHQAAMQMLKETINEEAAEWDRLHPVHAGPVAPGQMREPRGSDIAGTTSNLQEQIGWMTNNPPIPVGEIYKRWIILGLNKIVRMYSPTSILDIRQGPKEPFRDYVDRFYKTLRAEQASQEVKNWMTETLLVQNSNPDCKTILKALGPAATLEEMMTACQGVGGPGHKARVLAEAMSQVTSPATIMMQRGNFKGQRKMVKCFNCGKEGHIARNCRAPRKKGCWKCGKEGHQIKDCTERQANFLGKIWPSHKGRPGNFLQSRPEPTAPPEESLRFREETTTPSQKQETTDKELYPLASLKSLFGNDPLSQ

SEQ ID NO: 109 - protein, 499 aa, Human immunodeficiency virus
  misc_feature (39)..(39): Xaa can be any naturally occurring amino acid
  misc_feature (120)..(120): Xaa can be any naturally occurring amino acid
  misc_feature (129)..(129): Xaa can be any naturally occurring amino acid
  misc_feature (145)..(145): Xaa can be any naturally occurring amino acid
  misc_feature (180)..(180): Xaa can be any naturally occurring amino acid
  misc_feature (201)..(201): Xaa can be any naturally occurring amino acid
  misc_feature (203)..(203): Xaa can be any naturally occurring amino acid
  misc_feature (261)..(261): Xaa can be any naturally occurring amino acid
  misc_feature (271)..(271): Xaa can be any naturally occurring amino acid
  misc_feature (306)..(306): Xaa can be any naturally occurring amino acid
  misc_feature (312)..(312): Xaa can be any naturally occurring amino acid
  misc_feature (331)..(331): Xaa can be any naturally occurring amino acid
  misc_feature (481)..(482): Xaa can be any naturally occurring amino acid
MGARASVLSGGALDKWEKIRLRPGGKKKYKLKHIVWASXELERFAVNPGLLETSEGCRQILVQLQPSLQTGSEELKSLYNTVAVLYCVHQRIDIKDTKEALEKIEEEQNKSKKKAQQAAXDTGNSSQVXQNYPIVQNLQGQMVHXPISPRTLNAWVKVVEEKAFSPEVIPMFSALAEGAXPQDLNTMLNTVGGHQAAMQMXKXTINEEAAEWDRLHPVHAGPIAPGQMREPRGSDIAGTTSNLQEQIGWMTNNPPIPVGEXYKRWIILGLXKIVRMYSPTSILDIRQGPKEPFRDYVDRFYKTLRXEQASQXVKNWMTETLLVQNANPDCXTILKALGPAATLEEMMTACQGVGGPGHKARVLAEAMSQVTNSATVMMQRGNFKNQGKIVKCFNCGKVGHIARNCRAPRKKGCWKCGKEGHQMKDCDKQANFLGKIWPSHKERPGNFLQSRPEPTAPPAESFRFGEETTTPSQKQEPIDKXXYPMASLRSLFGNDPSSQ

SEQ ID NO: 110 - protein, 502 aa, Human immunodeficiency virus
  misc_feature (408)..(408): Xaa can be any naturally occurring amino acid
MGARASVLSGGDLDRWEKIRLRPGGKKQYKLKHIVWASRELERFAVNPGLLETAEGCKQILGQLQPALQTGSEEFRSLYNTVATLYCVHQKIDIRDTKEALDKIEEEQDKCKKKAQQAAANTGNSGQVSQNYPIVQNLQGQMVHQAISPRTLNAWVKVIEEKAFSPEVIPMFSALSEGATPQDLNTMLNTVGGHQAAMQMLKETINEEAAEWDRLHPVPAGPVAPGQMREPRGSDIAGTTSTLQEQIGWMTSNPAIPVGEIYKRWIILGLNKIVRMYSPVSILDIRQGPKEPFRDYVDRFYKVLRAEQASQDVKNWMTETLLVQNANPDCKTILKALGPAATLEEMMTACQGVGGPGHKARVLAEAMSQATNINAAAMMMQRGNFNGPRKTIKCFNCGKIGHLAKNCXAPRKKGCWKCGKEGHQMKDCNERQANFLGKIWPSNKGRPGNFLQSRPEPTAPPEESFRFGEEVATPSQKQEPRDKELYPLTSLRSLFGNDPSSQ

SEQ ID NO: 111 - protein, 505 aa, Human immunodeficiency virus
MGARASVLSGGELDKWEKIRLRPGGKKKYQLKHIVWASRELERFAVNPGLLETSGGCRQILEQLQPSLQTGSEELKSLFNTVATLYCVHQKIDIRDTKEALEKIEEEQNKSKKKAQQAAANTGNGNQASQVSQNYPIVQNLQGQMVHQPISPRTLNAWVKVVEEKAFSPEVIPMFAALSEGATPQDLNTMLNTVGGHQAAMQMLKETINEEAAEWDRMHPVHAGPVAPGQMREPRGSDIAGTTSTLQEQIGWMTSNPAIPVGEIYKKWIIMGLNKIVRMYSPTSILDIKQGPKESFRDYVDRFYKVLRAEQASQDVKNWMTETLLVQNANPDCKTILKALGPAATLEEMMTACQGVGGPGHKARVLAEAMCQVTGSATAAIMMQKGNFKTQRKIVKCFNCGREGHIAKNCRAPRKKGCWKCGKEGHQMKDCTERQANFLGKIWPSYKGRPGNFLQNRPEPSAPPEESFRFGEETATPSQKQEPTDKELYPLASLKSLFGNDPSSQ

SEQ ID NO: 112 - protein, 505 aa, Human immunodeficiency virus
MGARASVLSGGELDRWEKIRLRPGGKKQYKLKHIVWASRELERFAINPGLLETSEGCRQILGSLQPSLQTGSEELKSLYNTVATLYCVHQGINIKDTKEALDKVEEEQNKSKKKAQPAAADTGNTSQVSQNYPIVQNLQGQMVHQAISPRTLNAWVKVVEEKAFSPEVIPMFSALAEGATPQDLNTMLNTVGGHQAAMQMLKETINEEAAEWDRLHPVHAGPIAPGQMREPRGSDIAGTTSTLQEQIGWMTNNPPIPVGEIYKRWIIMGLNKIVRMYSPTSILDIKQGPKEPFRDYVDRFYKTLRAEQATQEVKNWMTETLLVQNANPDCKTILKALGPAATLEEMMTACQGVGGPGHKARVLAEAMSQASGLASAAIMMQRGNFRNQRKIVKCFNCGKEGHIAKNCRAPRKKGCWKCGKDGHQMKDCTERQANFLGKIWPSHKGRPGNFFQSRPEPTAPPAPPEESFRFGEEATTPPQKQERKDKELYPLASLKSLFGNDPSSQ

SEQ ID NO: 113 - protein, 502 aa, Human immunodeficiency virus
MGARASILSGGELDRWEKIRLRPGGKKKYKLKHIVWASRELERFAVNPGLLETSEGCRQILGQLQPSLQTGSEELKSVYNTVATLYCVHQKIEVKDTKEALDKIEEEQNKSKKRAQQAAAAADSGTNSNVSQNYPIVQNLQGQMVHQAISPRTLNAWVKVVEEKAFSPEVIPMFSALSEGATPQDLNTMLNTVGGHQAAMQMLKETINEEAAEWDRLHPVHAGPIAPGQMREPRGSDIAGTTSTLQEQIGWMTNNPPIPVGEIYKRWIILGLNKIVRMYSPTSILDIKQGPKEPFRDYVDRFYKILRAEQCSQDVKNWMTETLLVQNANPDCKTILKALGPAATLEEMMTACQGVGGPGHKARVLAEAMSQMTNSTAIMMQRGNFRNQRRSVKCFNCGKEGHIAKNCRAPRKKGCWKCGKEGHQMKDCTERQANFLGKLWPSHKGRPGNFLQSRPEPTAPPEESFRFGEETTTSSQKQEPIDKELYPSASLRSLFGNDPSSQ

SEQ ID NO: 114 - protein, 500 aa, Human immunodeficiency virus
MGARASVLSGGELDRWEKIRLRPGGKKKYKLKHIVWASRELERFAVNPGLLETSAGCRQILGQLQPSLQTGSEELKSLYNTVATLYCVHQRIEIKDTKEALEKIEEEQNKSKKKAQQAAADTGNSSQASQNYPIVQNLQGQMVHQPISPRTLNAWVKVVEEKSFSPEVIPMFSALSEGATPQDLNTMLNSVGGHQAAMQMLKETINEEAAEWDRIHPVHAGPVAPGQMREPRGSDIAGTTSNLQEQINWMTSNPPIPVGEIYKRWIILGLNKIVRMYSPTSILDIRQGPKEPFRDYVDRFYKTLRAEQASQDVKNWMTETLLVQNANPDCKTILKALGPAATLEEMMTACQGVGGPSHKARVLAEAMSQATGSAAIMMQRGNFRNQRKSVKCFNCGKEGHIARNCRAPRKKGCWKCGKEGHQMKECTERQANFLGKIWPSHKGRPGNFLQSRPEPTAPPAESFRFGEETATPSQKQEPIDKELYPSASLKSLFGNDPSSQ

SEQ ID NO: 115 - protein, 501 aa, Human immunodeficiency virus
  misc_feature (28)..(28): Xaa can be any naturally occurring amino acid
  misc_feature (30)..(30): Xaa can be any naturally occurring amino acid
  misc_feature (209)..(209): Xaa can be any naturally occurring amino acid
  misc_feature (269)..(269): Xaa can be any naturally occurring amino acid
  misc_feature (373)..(373): Xaa can be any naturally occurring amino acid
  misc_feature (375)..(375): Xaa can be any naturally occurring amino acid
  misc_feature (382)..(382): Xaa can be any naturally occurring amino acid
  misc_feature (387)..(387): Xaa can be any naturally occurring amino acid
MGARASVLSGGKLDRWEKIRLRPGGRKXYXLKHLVWASRELERFAVNPGLLETSEGCRQILEQLQPALKTGSEELRSLYNAVATLYCVHQDIEVKDTKEALDKIEEEQNKSKKKAQQAAADTGNSSQVSQNYPIVQNLQGQMVHQAISPRTLNAWVKVVEEKAFSPEVIPMFSALSEGATPQDLNTMLNTVGGHQAAMQMLKETINEEXAEWDRVHPVHAGPIAPGQMREPRGSDIAGTTSTLQEQIGWMTNNPPIPVGEIYKRWIILXLNKIVRMYSPTSILDIRQGPKEPFRDYVDRFYKTLRAEQASQEVKNWMTETLLVQNANPDCKTILKALGPAATLEDMMTACQGVGGPSHKARILAEAMSQVTNXAXIMIQRGXFRNPXKSVKCFNCGKEGHLARNCRAPRKKGCWKCGKEGHQMKDCTERQANFLGKIWPSHKGRPGNFLQSRPEPSAPPEESFRFGEKTTTPSQKQEPIDKEEQYPLASLKSLFGNDPSSQ

SEQ ID NO: 116 - protein, 502 aa, Human immunodeficiency virus
  misc_feature (334)..(334): Xaa can be any naturally occurring amino acid
  misc_feature (376)..(376): Xaa can be any naturally occurring amino acid
MGARASVLSGGKLDKWEKIRLRQGGRKKYKLKHLVWASRELERYAIDPGLLETAEGCRQILGQLQPALPTGSEELRSLHNAIATLYCVHQNIDIKDTKEALEKIEEEQNKSKKKAQQAAAGTGNSSSSQVSQNYPIVQNLQGQMVHQPISPRTLNAWVKVVEEKAFSPEVIPMFSALSEGATPQDLNTMLNTVGGHQAAMQMLKETINEEAAEWDRLHPVHAGPIAPGQMREPRGSDIAGTTSTLQEQIGWMTNNPPIPVGEIYKRWIILGLNKIVRMYSPTSILDIRQGPKEPFRDYVDRFYKTLRAEQASQDVKNWMTETLLVQNANPDCKXILKALGPAATLEEMMTACQGVGGPGHKARVLAEAMSHMTSQXTIMLQRGNFKNPGRPVKCFNCGKVGHIAKNCRAPRKKGCWKCGKEGHQMKDCTERQANFLGKIWPSNKGRPGNFLQSRPEPTAPPEESFRFGEETTTPSQKQEPIDKNLYPLTSLRSLFGNDPSSQ

SEQ ID NO: 117 - protein, 500 aa, Human immunodeficiency virus
MGARASVLSGGELDRWEKIRLRPGGKKKYRLKHVVWASRELERFAVNPGLLETSDGCRQILGQLQPALKTGSEELRSLFNTVATLYCVHQKIDVKDTKEALDKIEEEQNKSKKKAQQATADTGNSSQVSQNYPIVQNLQGQMVHQAISPRTLNAWVKVVEEKAFSPEVIPMFSALSEGATPQDLNTMLNTVGGHQAAMQMLKETINEEAAEWDRVHPVHAGPIAPGQMREPRGSDIAGTTSTLQEQIGWMTNNPPIPVGEIYKRWIILGLNKIVRMYSPTSILDIRQGPKEPFRDYVDRFYKTLRAEQASQEVKNWMTETLLVQNANPDCKTILKALGPAATLEEMMTACQGVGGPGHKARVLAEAMSHVTNSATIMMQKGNFRSQRKMVKCFNCGKEGHIAKNCRAPRKKGCWKCGKEGHQMKDCNERQANFLGKIRPSHKGRPGNFLQSRPEPTAPPEESFRFGEETTTPSQKQEQIDKELYPLTSLRSLFGNDPSSQ

SEQ ID NO: 118 - protein, 502 aa, Human immunodeficiency virus
MGARASILSGGKLDKWEKIRLRPGGKKSYQLKHLVWASRELERFAVNPGLLETAEGCRQILGQLQSSLKTGTEELRSLFNAVAVLYCVHQGIEVKDTKEALDKIEEEQNKSKKKAQQAEAADTGNNSNQVSQNYPIVQNLQGQMVHQAISPRTLNAWVKVVEEKAFSPEVIPMFAALSEGATPQDLNTMLNTVGGHQAAMQILKETINEEAAEWDRLHPVHAGPVAPGQMREPRGSDIAGTTSTLQEQIAWMTSNPPIPVGEVYKKWIIIGLNKIVRMYSPVSILDIRQGPKEPFRDYVDRFYKTLRAEQASQDVKNWMTETLLVQNANPDCKTILKALGPAATLEEMMAACQGVGGPGHKARVLAEAMSQVQNSATIMMQRGNPRNQRKTVKCFNCGKEGHIARNCRAPRKRGCWKCGKEGHQMKDCTERQANFLGKIWPSHKGRPGNFLQSRPEPSAPPEESFRFGEEATTPSQKQEQKDKEVYPLTSLRSLFGNDPLSQ

SEQ ID NO: 119 - protein, 502 aa, Human immunodeficiency virus
MGARASILSGGELDRWEKIRLRPGGNKRYKLKHIVWASRELERFAVNPGLLETSEGCRQILGQLQPSLKTGSEELKSLYNTVAVLYCVHERIEVKDTKEALDKIEEEQNKSKKKTQQAAADTGNSSQVSQNYPIIQNLQGQMVHQAISPRTLNAWVKVVEEKAFSPEVIPMFTALSEGATPHDLNTMLNTVGGHQAAMQMLKETINEEAAEWDRLHPVHAGPVAPGQMREPRGSDIAGTTSTLQEQIGWMTNNPPIPVGEIYKKWIIMGLNKIVRMYSPVSILDIRQGPKEPFREYVDRFYKTLRAEQASQDVKNWMTETLLIQNANPDCKTILKALGPGATLEEMMSACQGVGGPSHKARVLAEAMSQTTNAAAIMMQKGNFRNQRKIAKCFNCGKEGHIARNCRAPRKKGCWKCGKEGHQMKDCTERQANFLGKIWPSYKGRPGNFLQSRPEPTAPQPTAPPEESIRFGEETTTPSQKQEQKDKELYPLASLRSLFGNDQ

SEQ ID NO: 120 - protein, 500 aa, Human immunodeficiency virus
MGARASVLSGGELDRWEKIRLRPGGRKKYKLKHIVWASRELERFAVNPGLLETTAGCRQILEQLQPSLQTGSEELKSLYNTVATLYCVHQKIDVRDTKEALDKIEEEQNKSKRKAQQAAADTGNSSQVSQNYPIVQNLQGQMVHQAISPRTLNAWVKVIEEKAFSPEVIPMFSALSEGATPQDLNTMLNTVGGHQAAMQMLKETINEEAAEWDRLHPVHAGPIAPGQMREPRGSDIAGTTSTLQEQIGWMTNNPPIPVGEIYKRWIILGLNKIVRMYSPVSILDIRQGPKEPFRDYVDRFYKTLRAEQASQEVKNWMTETLLVQNANPDCKTILKALGPAATLEEMMTACQGVGGPGHKARVLAEAMSQVTNTTAIMMQKGNFRNQRKTVKCFNCGKEGHIARNCRAPRKKGCWKCGREGHQMKDCTERQANFLGKIWPSHKGRPGNFLQSRPEPTAPPEESLRFGGETTTPPQKQEPIDKELYPLASLKSLFGNDPLSQ

SEQ ID NO: 121 - protein, 502 aa, Human immunodeficiency virus
MGARASVLSGGKLDKWEKIRLRPGGKTKYKLQHLVWASRELERFAVNPGLLETAEGCRQILGQLQPSLQTGSEELKSLFNTIAVLYCVHQRIDVKDTKEAVDKIEEEQNKSKKKAQQAAADTGNSSQVSQNYPIVQNLQGQMVHQPISPRTLNAWVKVVEEKAFSPEVIPMFSALSEGATPQDLNTMLNTVGGHQAAMQMLKETINEEAAEWDRLHPVHAGPIAPGQMREPRGSDIAGTTSTLQEQIGWMTNNPPIPVGEIYKRWIILGLNKIVRMYSPTSILDIRQGPKEPFRDYVDRFYKTLRAEQATQEVKNWMTETLLVQNANPDCKTILKALGPAATLEEMMTACQGVGGPGHKARVLAEAMSQMTNSATATIMMQKGNFRNQRRTVKCFNCGKEGHIAKNCRAPRKRGCWKCGKEGHQMKDCTERQANFLGKIWPSHKGRPGNFAQGRLEPTAPPEEGFRFGEETTTPPQKQEPIDKDLYPSVSLRSLFGNDPSSQ

SEQ ID NO: 122 - protein, 502 aa, Human immunodeficiency virus
  misc_feature (85)..(85): Xaa can be any naturally occurring amino acid
  misc_feature (391)..(391): Xaa can be any naturally occurring amino acid
MGARASVLSGGELDKWERIRLRPGGKKQYKLKHIVWASRELERFAVNPGLLETSEGCRKILGQLQPSLQTGSEELKSLYNTVAVXYCVHQRIEVKDTKEALDKIEEEQNKSKKKAQQAAADTGNSSQVSQNYPIVQNLQGQMVHQALSPRTLNAWVKVVEEKAFSPEVIPMFTALSEGATPQDLNTMLNTVGGHQAAMQMLKETINEEAAEWDRLHPVQAGPVAPGQLREPRGSDIAGTTSTLQEQIAWMTHNPPIPVGEIYKRWIIMGLNKIVRMYSPTSILDIRQGPKEPFRDYVDRFYKTLRAEQASQEVKNWMTETLLVQNANPDCKHILKALGPGATLEEMMTACQGVGGPGHKARVLAEAMSQVTNTSAILMQRGNFRNQRKTVXCFNCGKEGHIARNCRAPRKKGCWKCGKEGHQMKDCTERQANFLGKIWPSYKGRPGNFLQNRPEPIVPTAPPEESFRFGEETTPSRKPEQGDKEMYPLTSLKSLFGNDPLSQ

SEQ ID NO: 123 - protein, 499 aa, Human immunodeficiency virus
MGARASILRGGKLDRWEKIRLRPGGKKQYKLKHLVWASRELERFAVNPGLLETSDGCRKILGQLQPSLQTGSEELKSLYNTIAVLYCVHQNIDIKDTKEALDRIEEEQNKCKKKVQQAAADTGNNSQVSQNYPIVQNLQGQMVHQAISPRTLNAWVKVVEEKAFSPEVIPMFAALSEGATPQDLNTMLNTVGGHQAAMQILKETINEEAAEWDRLHPAQAGPVAPNQVRDPRGSDIAGTTSTLQEQIAWMTHNPPIPVGEIYKKWIIIGLNTIVRMYSPTSILGIKQGPKEPFRDYVDRFYRTLRAEQASQDVKNWMTETLLVQNANPDCKTILKALGPAATLEEMMTACQGVGGPGHKARVLAEAMSQVTNSATVMMQKNNFGNQRKIVKCFNCGRQGHIAKNCKAPRKKGCWKCGKEGHQMKDCTERQANFLGKIWPSHKGRPGNFLQSRPEPSAPPAESVRFGEETTPPQKQEPIDEERYPLTSLRSLFGNDPSSQ

SEQ ID NO: 124 - protein, 504 aa, Human immunodeficiency virus
MGARASVLSGGELDRWEKIRLRPGGKKKYRLKHIVWASRELERFAVNPGLLETSDGCRQILEQLQPSLQTGSEELRSLYNTIATLYCVHQRIEIKDTKEALDKIEEEQNKSKKKAQQAQQAAAAADTGNRGQVSQNFPIVQNLQGQMVHQPLSPRTLNAWVKVVEEKAFSPEVIPMFTALSEGATPQDLNTMLNTVGGHQAAMQMLKETINEEAAEWDRLHPVHAGPIAPGQMREPRGSDIAGTTSNLQEQIGWMTHNPPIPVGEIYKRWIILGLNKIVRMYSPTSILDIKQGPKEPFRDYVDRFYKTLRAEQASQEVKNWMTETLLVQNANPDCKTILKALGPGATLEEMMTACQGVGGPSHKARVLAEAMSQVNSATVMMQRGNIRNQRKAVKCFNCGKEGHIARNCRAPRKKGCWKCGKEGHQMKDCTERQANFLGKIWPSHKGRPGNFLQSRPEPTAPPEESFRFGERTTTPPQKQEQIDKDLYPLASLKSLFGNDPSSQ

SEQ ID NO: 125 - protein, 506 aa, Human immunodeficiency virus
  misc_feature (41)..(41): Xaa can be any naturally occurring amino acid
  misc_feature (223)..(223): Xaa can be any naturally occurring amino acid
MGARASVLSGGKLDQWEKIRLRPGGSKKYRLKHLVWASREXERFAVNPGLLETAEGCRQILGQLQPSLQTGSEELKSLYNTVATLYCVHQRIEIKDTKEALDKIEEEQSKSKKGAQQAAADTGNSSQVSQNYPIVQNLQGQMVHQAISPRTLNAWVKVVEEKAFSPEVIPMFSALAEGATPHDLNTMLNTVGGHQAAMQMLKETINEEAAEWDRLHPVHAGPXAPGQMREPRGSDIAGTTSTLQEQIGWMTHNPPIPVGEIYKKWIIMGLNKVVKMYSPISILEIRQGPKEPFREYVDRFYKTLRAEQATQEVKNWMTETLLVQNANPDCKTILKALGPGATLEEMMSACQGVGGPGHKARVLAEAMSQVTNSATIMMQKGNFRNQRKTVKCFNCGKEGHIARNCRAPRKKGCWKCGREGHQMKDCSERQANFLGKIWPSHKGRPGNFLQNRPEPTAPPEPTAPPAESFRFGEETATPSQKQEPKDKELYPLASLRSLFGNDPSSQ

SEQ ID NO: 126 - protein, 500 aa, Human immunodeficiency virus
  misc_feature (399)..(399): Xaa can be any naturally occurring amino acid
  misc_feature (477)..(477): Xaa can be any naturally occurring amino acid
MGARASVLSGGELDKWEKIRLRPGGKKKYKLKHIVWASRELERFAVNPGLLETSEGCRQILGQLQPSLQTGSEELRSLFNTVATLYCVHQKIEVKDTKEALDKIEEEQNKSKKKAQQSAADTGNKQPVSQNYPIVQNLQGQMVHQALSPRTLNAWVKVIEEKAFSPEVIPMFSALSEGATPQDLNTMLNTVGGHQAAMQMLKETINEEAAEWDRLHPVHAGPIAPGQMREPRGSDIAGTTSTLQEQIGWMTHNPPIPVGEIYKRWIILGLNKIVRMYSPVSILDIRQGPKEPFRDYVDRFYKTLRAEQASQEVKNWMTETLLVQNANPDCKTILKALGPAATLEEMMTACQGVGGPGHKARVLAEAMSQMTNSNTVMMQRGNFRNQRKTVKCFNCGKEXHIAKNCRAPRKKGCWKCGKEGHQMKDCTERQANFLGRIWPSHKGRPGNFLQSRPEPSAPPEESFRFVEETTTPSQKQXPIDKELYPLTSLRSLFGNDPSSQ

SEQ ID NO: 127 - protein, 503 aa, Human immunodeficiency virus
  misc_feature (13)..(13): Xaa can be any naturally occurring amino acid
  misc_feature (22)..(22): Xaa can be any naturally occurring amino acid
  misc_feature (28)..(28): Xaa can be any naturally occurring amino acid
  misc_feature (52)..(52): Xaa can be any naturally occurring amino acid
  misc_feature (67)..(67): Xaa can be any naturally occurring amino acid
  misc_feature (102)..(102): Xaa can be any naturally occurring amino acid
  misc_feature (128)..(128): Xaa can be any naturally occurring amino acid
  misc_feature (130)..(130): Xaa can be any naturally occurring amino acid
  misc_feature (170)..(170): Xaa can be any naturally occurring amino acid
  misc_feature (316)..(316): Xaa can be any naturally occurring amino acid
  misc_feature (382)..(382): Xaa can be any naturally occurring amino acid
  misc_feature (421)..(421): Xaa can be any naturally occurring amino acid
MGARASVLSGGKXDRWEKIRLXPGGKKXYKLKHIVWASRELERFALNPGLLXTSEGCRQILEQLQPXIKTGTEELRSLFNTVSTLYCVHQKIDVKDTKEALXKIEEEQNKSKKKAQQAAAAAADTGNXSXVSQNYPIVQNLQGQMVHQALSPRTLNAWVKVVEEKAFSPXVIPMFSALSEGATPQDLNTMLNTVGGHQAAMQMLKETINEEAAEWDRLHPVHAGPIAPGQMREPRGSDIAGTTSTLQEQIGWMTHNPPIPVGEIYKRWIIMGLNKIVRMYSPTSILDIKQGPKEPFRDYVDRFYKTLRAEQASQEXKNWMTETLLVQNSNPDCKTILKALGPGATLEEMMTACQGVGGPSHKARVLAEAMSQVTNPTTIMMXKGNFRNQRKPVKCFNCGKEGHISKNCRAPRKKGCWKCGXEGHQMKDCTERQANFLGKIWPSHKGRPGNFLQSRPEPTAPPEESLRFGEETTTPSQKQEPVDKELYPFSSLRSLFGNDPSSQ

SEQ ID NO: 128 - protein, 501 aa, Human immunodeficiency virus
  misc_feature (13)..(13): Xaa can be any naturally occurring amino acid
  misc_feature (122)..(122): Xaa can be any naturally occurring amino acid
  misc_feature (168)..(168): Xaa can be any naturally occurring amino acid
  misc_feature (190)..(190): Xaa can be any naturally occurring amino acid
  misc_feature (248)..(248): Xaa can be any naturally occurring amino acid
  misc_feature (251)..(251): Xaa can be any naturally occurring amino acid
  misc_feature (309)..(309): Xaa can be any naturally occurring amino acid
  misc_feature (337)..(337): Xaa can be any naturally occurring amino acid
  misc_feature (390)..(390): Xaa can be any naturally occurring amino acid
  misc_feature (404)..(404): Xaa can be any naturally occurring amino acid
  misc_feature (443)..(443): Xaa can be any naturally occurring amino acid
  misc_feature (469)..(469): Xaa can be any naturally occurring amino acid
MGARASVLSGGKXDQWEKIRLRPGGKKKYRLKHIVWASRELERFAVNPGLLETSEGCRQILGQLQPSLQTGSEELKSLYNTIAVLYCVHQRIEIRDTKEALDKIEEEQNKCKKRVQQAAADXGSSSQVSQNYPIVQNLQGQMVHQAISPRTLNAWVKVVEEKAFSPEXIPMFSALSEGATPQDLNTMLNXVGGHQAAMQMLKETINEEAAEWDRLHPVHAGPIAPGQMREPRGSDIAGTTSTLQEQVXWMXNNPPIPVGEIYKRWIIMGLNKVVRMYSPTSILDIRQGPKEPFRDYVDRFYKTLRAEQXSQEVKNWMTETLLVQNANPDCKTILKAXGPAATLEEMMTACQGVGGPGHKARVLAEAMSQATNSAAAIMMQKGNFKTHRKXVKCFNCGREGHIAXNCRAPRKRGCWKCGKEGHQMKDCTERQANFLGKIWPSHXGRPGNFLQSRPEPTAPPEEIFRFGEXTTTPTQKQEPIDKELSPLASLKSLFGNDPSSQ

SEQ ID NO: 129 - protein, 500 aa, Human immunodeficiency virus
  misc_feature (107)..(107): Xaa can be any naturally occurring amino acid
  misc_feature (307)..(307): Xaa can be any naturally occurring amino acid
MGARASVLSGGELDKWERIRLRPGGKKKYRLKHIVWASRELERYSLNPGLLETTEGCRQILGQLQPALQTGSEELKSLYNTIAVLYCVHQRVEVKDTKEALDRIEEXQNKCKKKAQQAAADTGNNSQVSQNFPIVQNAQGQMVHQSISPRTLNAWVKVVEEKAFSPEVIPMFSALSEGATPQDLNTMLNTVGGHQAAMQMLKETINEEAAEWDRLHPVHAGPIAPGQMREPRGSDIAGTTSTLQEQVAWMTNNPPIPVGEIYKRWIILGLNKIVRMYSPTSILDIKQGPKEPFRDYVDRFYKTLRAXQASQDVKNWMTETLLVQNANPDCKTILKALGPAATLEEMMTACQGVGGPAYKAKVLAEAMSQATNSTNMMMQRGNFRNQRKIVKCFNCGKEGHIAKNCRAPRKKGCWKCGKEGHQMKECSERQANFLGKIWPSHKGRPGNFLQSRPEPTAPPEESFRFGEETATPPQKQEPIDKELYPSASLRSLFGNDPLLQ

SEQ ID NO: 130 - protein, 500 aa, Human immunodeficiency virus
  misc_feature (411)..(411): Xaa can be any naturally occurring amino acid
MGARASVLSGGDLDRWEKIRLRPGGKKKYKLKHIVWASRELERFAVNPGLLETSKGCRQILEQLQPALQTGSEELKSLYNTVATLYCVHLKIEVKDTKEALDTIEKEQNKSKAKEQQAAADTGNSSKVSQNFPIVQNLQGQMVHQAISPRTLNAWVKVVEEKAFSPEVIPMFTALSEGATPQDLNTMLNTVGGHQAAMQMLKETINEEAAEWDRTHPVHAGPIAPGQMREPRGSDIAGTTSTLQEQIGWMTHNPPIPVGEIYKRWIILGLNKIVRMYSPTSILDIRQGPKEPFRDYVDRFYKTLRAEQASQDVKNWMTETLLVQNANPDCRTILKALGPAATLEEMMTACQGVGGPGHKARVLAEAMSQVTNSTAIMMQKGNFGNQRKSIKCFNCGKVGHLARNCRAPRKXGCWKCGKEGHQMKDCTERQANFLGKIWPSSKGRPGNFLQSRPEPTAPPEESFRFGEEIATPSQKQGQMDKELYPSASLKSLFGNDPLSQ

SEQ ID NO: 131 - protein, 505 aa, Human immunodeficiency virus
  misc_feature (126)..(126): Xaa can be any naturally occurring amino acid
  misc_feature (398)..(398): Xaa can be any naturally occurring amino acid
MGARASVLSGGELDKWEKIRLRPGGKKKYRLKHIVWASRELERFAVNPGLLETSDGCRQILGQLQPALQTGSEELRSLYNTVATLYCVHQRIEVKDTKEALDKIEEEQNKSKKKAQQAAADTGNGXQSSGNQVSQNYPIVQNLQGQMVHQAITPRTLNAWVKVVEEKAFSPEVIPMFSALSEGATPQDLNTMLNTVGGHQAAMQMLKETINEEAAEWDRLHPVHAGPIAPGQMREPRGSDIAGTTSTLQEQIAWMTNNPPIPVGDIYKRWIILGLNKIVRMYSPVSILDIRQGPKEPFRDYVDRFYKTLRAEQTTQEVKNWMTETLLVQNANPDCKTILKALGPAATLEEMMTACQGVGGPGHKARVLAEAMSQVTNSTSIMMQRGNFKNQRRTVKCXNCGKDGHIAKNCRAPRKKGCWKCGKEGHQMKDCNERQANFLGKIWPSHKGRPGNFLQSRPEPSAPPEESFSFGPETTTPSQKQEPIDQGVYPLTSLKSLFGNDPSSQ

SEQ ID NO: 132 - protein, 503 aa, Human immunodeficiency virus
  misc_feature (76)..(76): Xaa can be any naturally occurring amino acid
  misc_feature (88)..(88): Xaa can be any naturally occurring amino acid
  misc_feature (90)..(90): Xaa can be any naturally occurring amino acid
  misc_feature (188)..(188): Xaa can be any naturally occurring amino acid
  misc_feature (292)..(292): Xaa can be any naturally occurring amino acid
  misc_feature (348)..(348): Xaa can be any naturally occurring amino acid
  misc_feature (389)..(389): Xaa can be any naturally occurring amino acid
  misc_feature (478)..(478): Xaa can be any naturally occurring amino acid
MGARASVLSGGELDRWEKIRLRPGGKKKYRLKHIVWASRELERFAVNPGLLETSEGCRQILVQLQPSLQTGSEELXSLYNTIATLYCXHXRIEVKDTKEALEKIEEEQNKSKKKTQQAAADTRNNSQVSQNYPIVQNLQGQMVHQAISPRTLNAWVKVVEEKAFSPEVIPMFSALSEGATPQDLNTMXNTVGGHQAAMQMLKETINEEAAEWDRLHPVQAGPIAPGQIRDPRGSDIAGTTSTLQEQITWMTNNPPIPVGEIYKRWIIMGLNKIVRMYSPTSILDIRQGPKEXFRDYVDRFYKTLRAEQASQEVKNWMTETLLVQNANPDCKTILKALGPAATLEEMMXACQGVGGPGHKARVLAEAMSQVTNSANIMMQRGNFRPQRKXVKCFNCGKEGHIAKNCRAPRKKGCWKCGKEGHQIKDCTERQANFLGKIWPSHRERPGNFLQSRPEPTAPPAESFGFGEETTTPSQKQEXTDKEHKELYPLASLRSLFGNDPSSQ

SEQ ID NO: 133 - protein, 500 aa, Human immunodeficiency virus
  misc_feature (76)..(76): Xaa can be any naturally occurring amino acid
  misc_feature (486)..(486): Xaa can be any naturally occurring amino acid
MGARASVLSGGELDRLEKIRLRAGGKKKYRLKHVVWASRELEQFAINPGLLETSEGCRQILGQLQPALQTGSEELXSLYNTVATLYCVHKKLEIRDTQEALEKIEEEQNKSKKKAQQAAAGTGNSNQVSQNYPIVQNLQGQMVHQAISPRTLNAWVKVVEEKAFSPEVIPMFAALSEGATPQDLNTMLNTVGGHQAAMQMLKETINEEAAEWDRMHPVHAGPIAPGQMREPRGSDIAGTTSTLQEQIGWMTNNPPIPVGEIYKKWIIMGLNKIVRMYSPTSILDIRQGPKEPFRDYVDRFYKTLRAEQASQEVKNWMTETLLVQNANPDCKTILKALGPAATLEEMMTACQGVGGPGHKARVLAEAMSQVTSSATIMMQKGNFRNQRRIVKCFNCGKEGHIAKNCRAPRKKGCWKCGKEGHQMKECTERQANFLGKIWPSHKGRPGNFLQSRPEPTAPPEESFRFGEETATPSQKQEPIDKEMYPXASLKSLFGNDPSSQ

SEQ ID NO: 134 - protein, 500 aa, Human immunodeficiency virus
  misc_feature (18)..(18): Xaa can be any naturally occurring amino acid
  misc_feature (127)..(127): Xaa can be any naturally occurring amino acid
  misc_feature (189)..(189): Xaa can be any naturally occurring amino acid
  misc_feature (215)..(215): Xaa can be any naturally occurring amino acid
  misc_feature (283)..(283): Xaa can be any naturally occurring amino acid
  misc_feature (361)..(361): Xaa can be any naturally occurring amino acid
  misc_feature (449)..(449): Xaa can be any naturally occurring amino acid
  misc_feature (451)..(451): Xaa can be any naturally occurring amino acid
  misc_feature (481)..(481): Xaa can be any naturally occurring amino acid
MGARASVLSGGKLDKWEXIRLRPGGKKQYRLKHIVWASRELERFAVNPGLLETSDGCRQILIQLQPSIQTGSEELKSLYNTVATLYCVHQNIEIRDTKEALEKVEEEQNKSKKKAQQAAANTGNSSXVSQNYPIVQNLQGQMVHQPISARTLNAWVKVVEEKAFSPEVIPMFSALSEGATPQDLNTMLXTVGGHQAAMQMLKEAINEEAAEWDRXHPVHAGPIAPGQMREPRGSDIAGTTSTLQEQIGWMTSNPPIPVGEIYKRWIILGLNKIVRMYSPVSIXDIRQGPKEPFRDYVDRFYKTLRAEQASQDVKNWMTETLLVQNANPDCKTILKALGPAATLEEMMTACQGVGGPGHKAXVLAEAMSQATNTAAAIMMQRGNFRNQRKSVKCFNCGKEGHIARNCRAPRKKGCWKCGQEGHQMKDCTERQANFLGKIWPSHKGRPGNXLXSRPEPTAPPEESLRFGEETTTPSQKQEPEXKGYPLTSLRSLFGNDPSSQ

SEQ ID NO: 135 - protein, 500 aa, Human immunodeficiency virus
  misc_feature (56)..(56): Xaa can be any naturally occurring amino acid
  misc_feature (102)..(102): Xaa can be any naturally occurring amino acid
  misc_feature (138)..(138): Xaa can be any naturally occurring amino acid
  misc_feature (147)..(147): Xaa can be any naturally occurring amino acid
  misc_feature (159)..(159): Xaa can be any naturally occurring amino acid
  misc_feature (252)..(252): Xaa can be any naturally occurring amino acid
  misc_feature (286)..(286): Xaa can be any naturally occurring amino acid
  misc_feature (322)..(322): Xaa can be any naturally occurring amino acid
  misc_feature (331)..(331): Xaa can be any naturally occurring amino acid
  misc_feature (385)..(385): Xaa can be any naturally occurring amino acid
  misc_feature (460)..(460): Xaa can be any naturally occurring amino acid
  misc_feature (470)..(470): Xaa can be any naturally occurring amino acid
  misc_feature (479)..(479): Xaa can be any naturally occurring amino acid
  misc_feature (483)..(483): Xaa can be any naturally occurring amino acid
MGARASVLSGGELDKWEKIRLRPGGKKQYKLKHIVWASRELERFAVNPGLLETAKXCSQILEQLQPSLQTGSEELRSLYNTVATLYCVHQKIEVKDTKEALXKVEEEQNKSKKKAQQAAADTRNSSQVSQNYPIVQNXQGQMVHQPXSPRTLNAWVKVXEEKAFSPEVIPMFSALSEGATPQDLNTMLNTVGGHQAAMQMLKETINEEAADWDRLHPVHAGPIAPGQMREPRGSDIAGTTSTLQEQIGWMTXNPPIPVGEIYKRWIILGLNKIVRMYSPTSILDIXQGPKEPFRDYVDRFYKTLRAEQASQEVKNWMTETLXVQNANPDCXTILKALGPAATLEEMMTACQGVGGPGHKARVLAEAMSQVTNSATVMMQRGNFRXQRKTVKCFNCGKEGHIARNCRAPRKKGCWKCGKEGHQMKDCTERQANFLGKIWPSHKGRPGNFLQSRPEPTAPPXESFRFGEETXTPSQKQETXDKEXYPLASLRSLFGNDPSSQ

SEQ ID NO: 136 - protein, 500 aa, Human immunodeficiency virus
  misc_feature (28)..(28): Xaa can be any naturally occurring amino acid
  misc_feature (52)..(52): Xaa can be any naturally occurring amino acid
  misc_feature (66)..(66): Xaa can be any naturally occurring amino acid
  misc_feature (84)..(84): Xaa can be any naturally occurring amino acid
  misc_feature (105)..(105): Xaa can be any naturally occurring amino acid
  misc_feature (118)..(118): Xaa can be any naturally occurring amino acid
  misc_feature (188)..(188): Xaa can be any naturally occurring amino acid
  misc_feature (219)..(219): Xaa can be any naturally occurring amino acid
  misc_feature (415)..(415): Xaa can be any naturally occurring amino acid
  misc_feature (485)..(485): Xaa can be any naturally occurring amino acid
MGARASVLSGGELDRWEKIRLRPGGKKXYQLKHIVWASRELERFAVNPGLLXTSEGCRQILGQLQXSLQTGSEELKSLYNTVAXLYCVHQRIEVKDTKEALEKVXEEQNKSKKQAQQXAADTAKSSQVSQNYPIVQNIQGQMVHQAISPRTLNAWVKVVEEKAFSPEVIPMFSALSEGATPQDLNTMXNTVGGHQAAMQMLKETINEEAAEWDRLHPVXAGPVAPGQMREPRGSDIAGTTSTLQEQIGWMTSNPAIPVGEIYKRWIIMGLNKIVRMYSPTSILDIRQGPKEPFRDYVDRFYKTLRAEQASQEVKNWMTETLLVQNANPDCKTILKALGPGATLEEMMTACQGVGGPGHKARVLAEAMSQVTNSATIMMQRGNFKNQRKTVKCFNCGKEGHIARNCRAPRKKGCWXCGKEGHQMKDCTERQANFLGKIWPSHKGRPGNFLQSRPEPTAPPAPPEESFRFGEETITPPQRQEPTDKXMYPLASLKSLFGSDP

SEQ ID NO: 137 - protein, 501 aa, Human immunodeficiency virus
  misc_feature (182)..(182): Xaa can be any naturally occurring amino acid
MGARASVLSGGKLDRWEKIRLRPGGKKKYKLKHIVWASRELERFAVNPGLLETSEGCRQILGQLQPSLQTGSEELKSLYNTIATLYCVHQRIEIKDTKEALDKIEEEQNKSKKKAQPAAAAAAGNDNQVSQNYPIVQNLQGQMVHQPLSPRTLNAWVKVIEEKAFSPEVIPMFTALSEGATXQDLNTMLNTVGGHQAAMQMLKETINEEAAEWDRLHPPQAGPVAPGQMRDPRGSDIAGTTSTLQEQIGWMTSNPPIPVGEIYKRWIILGLNKIVRMYSPISILDIRQGPKEPFRDYVDRFYKTLRAEQASQDVKNWMTETLLVQNANPDCKTILKALGPGASLEEMMTACQGVGGPSHKARVLAEAMSQATNTATIMMQKGNFKNQRKMVKCFNCGKEGHIAKNCRAPRKKGCWKCGREGHQMKDCTERQANFLGKIWPSHKGRPGNFLQSRPEPTAPPEESFRFGEEAAAPPQKQEPTDKEMYPLASLRSLFGNDPSSQ

SEQ ID NO: 138 - protein, 502 aa, Human immunodeficiency virus
  misc_feature (260)..(260): Xaa can be any naturally occurring amino acid
  misc_feature (286)..(286): Xaa can be any naturally occurring amino acid
  misc_feature (409)..(409): Xaa can be any naturally occurring amino acid
  misc_feature (449)..(449): Xaa can be any naturally occurring amino acid
MGARASVLSGGELDKWEKIRLRPGGKKRYKLKHIVWASRELERFAVNPGLLETSEGCRQIMVQLQPSLQTGSEELKSLYNTVATLYCVHQRIDVKDTKEALDKIEEEQNKCKKKAQQAAADTGNSSQISQNFPIVQNLQGQMVHQAISPRTLNAWVKVVEEKAFSPEVIPMFSALSEGATPQDLNTMLNTVGGHQAAMQMLKETINEEAAEWDRLHPVHAGPIAPGQMREPRGSDIAGTTSTLQEQIGWMTNNPPIPVGXIYKRWIILGLNKIVRMYSPTSILDIXQGPKEPFRDYVDRFYKTLRAEQASQEVKNWMTDTLLVQNANPDCKTILKALGPGATLEEMMTACQGVGGPSHKARILAEAMSQANSAAIMMQKGNFKNQRRTVKCFNCGKEGHVAKNCRAPRXKGCWKCGQEGHQMKDCTARQANFLGKIWPSSKGRPGNFLXSRPEPTAPPAPPEESFRFGEETTTPSQKQEPTDKSLYPLASLRSLFGNDPSSQ

SEQ ID NO: 139 - protein, 498 aa, Human immunodeficiency virus
  misc_feature (76)..(76): Xaa can be any naturally occurring amino acid
  misc_feature (139)..(139): Xaa can be any naturally occurring amino acid
  misc_feature (164)..(164): Xaa can be any naturally occurring amino acid
  misc_feature (390)..(390): Xaa can be any naturally occurring amino acid
  misc_feature (392)..(392): Xaa can be any naturally occurring amino acid
  misc_feature (408)..(408): Xaa can be any naturally occurring amino acid
MGARASVLSGGELDRWEKIRLRPGGKKKYNLKHVVWASRELERFAVNPGLLETAEGCRQILGQLQPSLRTGSEELXSLYNTVATLYCVHQKIEVKDTKEALDKIEEEQNRSKKKAQQAATDTGSKEQISQNYPIVQNLXGQMVHQAISPRTLNAWVKVIEEKAXSPEVIPMFSALSEGATPQDLNTMLNTVGGHQAAMQMLKETINEEAAEWDRLHPVHAGPAAPGQMREPRGSDIAGSTSTLQEQIGWMTSNPPIPVGEIYKRWIILGLNKIVRMYSPVSILDIKQGPKEPFRDYVDRFYKTLRAEQATQEVKNWMTETLLVQNANPDCKTILKALGPAATLEEMMTACQGVGGPGHKARILAEAMSQATSAAIMMQRGNFRDKRKTVXCXNCGREGHIAKNCRAPXKKGCWKCGKEGHQMKECTERQANFLGKIWPSHKGRPGNFLQSKVEPTAPPEESIRFGEETTPSQKQEPIDKELYPLASLKSLFGNDPSSQ

SEQ ID NO: 140 - protein, 500 aa, Human immunodeficiency virus
  misc_feature (11)..(11): Xaa can be any naturally occurring amino acid
  misc_feature (24)..(24): Xaa can be any naturally occurring amino acid
  misc_feature (53)..(53): Xaa can be any naturally occurring amino acid
  misc_feature (103)..(103): Xaa can be any naturally occurring amino acid
  misc_feature (113)..(113): Xaa can be any naturally occurring amino acid
  misc_feature (136)..(136): Xaa can be any naturally occurring amino acid
  misc_feature (145)..(145): Xaa can be any naturally occurring amino acid
  misc_feature (164)..(164): Xaa can be any naturally occurring amino acid
  misc_feature (167)..(167): Xaa can be any naturally occurring amino acid
  misc_feature (235)..(235): Xaa can be any naturally occurring amino acid
  misc_feature (249)..(249): Xaa can be any naturally occurring amino acid
  misc_feature (313)..(313): Xaa can be any naturally occurring amino acid
  misc_feature (380)..(380): Xaa can be any naturally occurring amino acid
  misc_feature (463)..(463): Xaa can be any naturally occurring amino acid
  misc_feature (465)..(465): Xaa can be any naturally occurring amino acid
  misc_feature (479)..(479): Xaa can be any naturally occurring amino acid
  misc_feature (486)..(486): Xaa can be any naturally occurring amino acid
MGARASVLSGXELDRWEKIRLRPXGKKKYKLKHIVWASRELERFAVNPGLLEXSEGCRKILEQLQPSLQTGSEELKSLFNTVATLYCVHQRIEIKDTKEALEXIEEEQNKSKXKAQQAAADTGNSSSQVSQNYPIXQNIQGQMVXQAISPRTLNAWVKVIEEKXFSXEVIPMFSALSEGATPQDLNTMLNTVGGHQAAMQMLKETINEEAAEWDRLHPVHAGPIAPGQMREPRGXDIAGTTSTLQEQIXWMTHNPPIPVGDIYKRWIIMGLNKIVRMYSPVSILDIRQGPKEPFRDYVDRFYKTLRAEQASQXVKNWMTETLLVQNANPDCKTILKALGPAATLEEMMTACQGVGGPSHKARVLAEAMSQTNSATIMMQXGNFRNPKKTVKCFNCGKEGHIARNCRAPRKKGCWKCGKEGHQMKDCSERQANFLGRLWPSHKGRPGNFLQSRPEPTAPPEESXSXREEITTPPQKQEPXDKTMYPXTSLRSLFGNDPSSQ

SEQ ID NO: 141 - protein, 505 aa, Human immunodeficiency virus
MGARASVLSGGELDRWEKIRLRPGGKKQYKLKHIVWASRELERFAVNPSLLETSEGCKQILAQLQPSLQTGSEELKSLYNTIAVLYCVHQRIEVKDTKEALDKIEEEQNKSKKKVQQQQAAAAAGSSSQVSQNYPIVQNLQGQMVHQAISPRTLNAWVKVVEEKAFSPEVIPMFSALSEGATPQDLNTMLNTVGGHQAAMQMLKETINEEAAEWDRLHPVHAGPIAPGQMREPRGSDIAGTTSTLQEQIGWMTNNPPIPVGEIYKRWIILGLNKIVRMYSPTSILDIKQGPKEPFRDYVDRFYKTLRAEQATQEVKNWMTETLLVQNANPDCKTILKALGPAATLEEMMTACQGVGGPGHKARVLAEAMSQVTNPATVMMQRGNFRNQRKIVKCFNCGKEGHIARNCRAPRKKGCWKCGKEGHQMKDCTERQANFLGKIWPSHKGRPGNFLQSRPEPTAPPAPPEESFRFGEETAAPSQKQEPIDKELYPLASLKSLFGNDPSSQ

SEQ ID NO: 142 - protein, 510 aa, Human immunodeficiency virus
MGARASVLSGGELDRWEKIRLRPGGKKRYKLKHIVWASRELERFAVNPGLLETSEGCRQILGQLQPSLQTGSEELKSLYNTIAVLYCVHQRIEVKDTKEALEKIEEEQNKSKKKAQQAAADTGNSGTNTGNSGTVSQNYPIVQNLQGQMVHQPLSPRTLNAWVKVVEEKAFSPEVIPMFSALSEGATPQDLNTMLNTVGGHQAAMQMLKETINEEAAEWDRLHPVHAGPIAPGQMREPRGSDIAGTTSTLQEQIGWMTHNPPIPVGEIYKRWIILGLNKIVRMYSPTSILDIRQGPKEPFRDYVDRFYKTLRAEQASQEVKNWMTETLLVQNANPDCKTILKALGPGATLEEMMTACQGVGGPGHKARVLAEAMSQMTNPASIMMQRGNYRNQRKTVKCFNCGKEGHIARNCRAPRKKGCWKCGKEGHQMKDCTERQANFLGKIWPSHKGRPGNFLQSRPEPTAPPAPPEESFMFGEETTTPPQKQESIDKGGYPLTSLRSLFGNDPSSQ

SEQ ID NO: 143 - protein, 500 aa, Human immunodeficiency virus
MGARASVLSGGELDRWEKIRLRPGGNKRYRLKHIVWASRELERFAVNPGLLETAGGCRQILAQLQPSLQTGSEELKSLFNTVATLYCVHQRIEVKDTKEALEKIEEEQNKSKKKAQPAAADAGTSSQASQNYPIVQNLQGQMVHQAISPRTLNAWVKVVEEKAFSPEVIPMFSALSEGATPQDLNTMLNTVGGHQAAMQMLKETINEEAAEWDRLHPVHAGPIAPGQMREPRGSDIAGTTSTLQEQIGWMTNNPPIPVGEIYKRWIILGLNKIVRMYSPTSILDIKQGPKEPFRDYVDRFYKTLRAEQATQEVKNWMTETLLVQNANPDCKTILKALGPAATLEEMMTACQGVGGPGHKARVLAEAMSQVTGSATIMMQRGNFKNQRKTVKCFNCGKEGHIARNCRAPRKKGCWKCGREGHQMKDCTERQANFLGKIWPSHKGRPGNFLQSRPEPTAPPEESFRFGEETTTPPQKQEPIDKEVYPLTSLKSLFGNDPSSQ

SEQ ID NO: 144 - protein, 503 aa, Human immunodeficiency virus
  misc_feature (46)..(46): Xaa can be any naturally occurring amino acid
  misc_feature (264)..(264): Xaa can be any naturally occurring amino acid
  misc_feature (422)..(422): Xaa can be any naturally occurring amino acid
  misc_feature (479)..(479): Xaa can be any naturally occurring amino acid
  misc_feature (481)..(481): Xaa can be any naturally occurring amino acid
MGARASVLSGGELDRWEKIRLRPGGKKKYKLKHIVWASRELERFAXNPGLLETSGGCRQILEQLQPALQTGSEELKSLFNTVATLYCVHQKIDVRDTKEALDKIEEEQNKSKKKAPQTAAAAADAGSNSKVSLNYPIVQNLQGQMVHQALSPRTLNAWVKVIEEKAFSPEVIPMFSALSEGATPQDLNTMLNTVGGHQAAMQMLKETINEEAAEWDRLHPVHAGPIAPGQMREPRGSDIAGTTSNLQEQIAWMTNNPPIPVGEXYKRWIILGLNKIVRMYSPVSILDIRQGPKEPFRDYVDRFYKTLRAEQATQEVKNWMTETLLVQNANPDCKTILKALGPGATLEEMMTACQGVGGPGHKARVLAEAMSQMTNSATVMMQRGNFKGQRKIVKCFNCGKEGHIAKNCRAPRKKGCWKCGKXGHQMKDCDRQANFLGKIWPSSKGRPGNFLQSRPEPTAPPEESFRFGEETTPPQKQEXTXRDKELYPLASLKSLFGNDPSSQ

SEQ ID NO: 145 - protein, 494 aa, Human immunodeficiency virus
  misc_feature (41)..(41): Xaa can be any naturally occurring amino acid
  misc_feature (44)..(44): Xaa can be any naturally occurring amino acid
  misc_feature (180)..(180): Xaa can be any naturally occurring amino acid
  misc_feature (258)..(258): Xaa can be any naturally occurring amino acid
  misc_feature (301)..(301): Xaa can be any naturally occurring amino acid
  misc_feature (307)..(307): Xaa can be any naturally occurring amino acid
  misc_feature (316)..(316): Xaa can be any naturally occurring amino acid
MGARASVLSGGELDKWEKIRLRPGGKKKYQLKHIVWASREXERXAVNPGLLETSEGCRQILGQLQPSLQTGSEELRSLYNTVATLYCVHQRIDVKDTKEALDKVEEEQDKSKKKAQQAAADSSQVSQNYPIVQNMQGQMVHQAISPRTLNAWVKVVEEKAFSPEVIPMFAALSEGATPQXLNTMLNTVGGHQAAMQMLKETINEEAAEWDRLHPVHAGPIAPGQMREPRGSDIAGTTSTLQEQIGWMTSNPPTPVGEXYKRWIILGLNKIVRMYSPTSILDIRQGPKEPFRDYVDRFYKTXRAEQAXQEVKNWMTXTLLVQNANPDCKTILKALGPGATLEDMMTACQGVGGPGHKARVLAEAMSQVNPATIMVQRGNFRNQRKTVKCFNCGKEGHVARNCRAPRKKGCWKCGKEGHQMKDCTERQVNFLGKIWPSHKERPGNFFQSRPEPTAPPAESFREETTTPSQKQEPKDKELYPLASLKSLFGNDPSSQ

SEQ ID NO: 146 - protein, 500 aa, Human immunodeficiency virus
MGARASVLSGGQLDRWEKIRLRPGGKKKYKLKHIVWASRELERFAVNPGLLETGEGCRQILAQLQPSLQTGSEELKSLYNAVATLYCVHQKIEVKDTKEALEKVEEEQNRSKRKVQQAAADTGNSSTISQNFPIVQNLQGQMVHQSLSPRTLNAWVKVVEEKAFSPEVIPMFSALSEGATPQDLNTMLNTVGGHQAAMQMLKETINEEAAEWDRVHPVHAGPIAPGQMREPRGSDIAGTTSTLQEQIGWMTNNPPIPVGEIYKRWIILGLNKIVRMYSPTSILDIRQGPKEPFRDYVDRFYKTLRAEQASQDVKNWMTETLLVQNSNPDCKTILKAMGPGATLEEMMTACQGVGGPGHKARVLAEAMSQVTSPANIMMQRGNFKNQRKIVKCFNCGKDGHIAKNCRAPRKKGCWKCGKEGHQMKECTERQVNFLGKIWPSHKGRPGNFLQSRLEPTAPPEESVRFGEETTTPSQKQEPIDKELYPLTSLKSLFGNDPSSQ

SEQ ID NO: 147 - protein, 504 aa, Human immunodeficiency virus
  misc_feature (88)..(88): Xaa can be any naturally occurring amino acid
  misc_feature (91)..(91): Xaa can be any naturally occurring amino acid
  misc_feature (110)..(110): Xaa can be any naturally occurring amino acid
  misc_feature (119)..(119): Xaa can be any naturally occurring amino acid
  misc_feature (177)..(177): Xaa can be any naturally occurring amino acid
  misc_feature (215)..(215): Xaa can be any naturally occurring amino acid
  misc_feature (482)..(482): Xaa can be any naturally occurring amino acid
MGARASVLSGGKLDKWEKIRLRPGGKKKYKLKHIVWASRELERFAVNPGLLETSEGCRQILRQLQPSLQTGSEELKSLYNTVATLYCXHQXIEVKDTKEALDRIEEEQNXCKKKAQQAXADTGNSNQVSQNYPIVQNMQGQMVHQAISPRTLNAWVKVVEEKAFSPEVIPMFSALSXGATPQDLNTMLNTVGGHQAAMQMLKETINEEAAEWDRXHPVHAGPIAPGQMREPRGSDIAGTTSTLQEQIGWMTNNPPIPVGEIYKRWIILGLNKIVRMYSPTSILDIRQGPKEPFRDYVDRFYKTLRAEQASQEVKNWMTETLLVQNANPDCKTILKALGPAATLEEMMTACQGVGGPGHKARVLAEAMSQVTNSATIMMQRGNFGNQKRKVKCFNCGKEGHIAKNCRAPRRKGCWKCGKEGHQMKDCIERQVNFLGKIWPSHKEGRPGNFLQSRPEPTAPPAPPEESFRFGEGTTTPSQKQEXTDKELYPLASLKSLFGNDPLLQ

SEQ ID NO: 148 - protein, 500 aa, Human immunodeficiency virus
  misc_feature (67)..(67): Xaa can be any naturally occurring amino acid
  misc_feature (79)..(79): Xaa can be any naturally occurring amino acid
  misc_feature (82)..(82): Xaa can be any naturally occurring amino acid
  misc_feature (111)..(111): Xaa can be any naturally occurring amino acid
  misc_feature (143)..(143): Xaa can be any naturally occurring amino acid
  misc_feature (207)..(207): Xaa can be any naturally occurring amino acid
  misc_feature (218)..(218): Xaa can be any naturally occurring amino acid
  misc_feature (252)..(252): Xaa can be any naturally occurring amino acid
  misc_feature (275)..(275): Xaa can be any naturally occurring amino acid
  misc_feature (292)..(292): Xaa can be any naturally occurring amino acid
  misc_feature (340)..(340): Xaa can be any naturally occurring amino acid
  misc_feature (350)..(350): Xaa can be any naturally occurring amino acid
  misc_feature (388)..(388): Xaa can be any naturally occurring amino acid
  misc_feature (427)..(427): Xaa can be any naturally occurring amino acid
  misc_feature (443)..(443): Xaa can be any naturally occurring amino acid
  misc_feature (446)..(446): Xaa can be any naturally occurring amino acid
  misc_feature (448)..(448): Xaa can be any naturally occurring amino acid
  misc_feature (473)..(473): Xaa can be any naturally occurring amino acid
  misc_feature (477)..(477): Xaa can be any naturally occurring amino acid
  misc_feature (490)..(490): Xaa can be any naturally occurring amino acid
  misc_feature (500)..(500): Xaa can be any naturally occurring amino acid
MGARASVLSGGKLDKWERIRLRPGGKKKYRLKHIVWASRELERFAVNSGLLETSEGCRQILGQLQPXLQTGSEELRSLXNTXATLYCVHQGIDIKDTKEALDKIEEEQNKXKKKAKQAEADAGNNSQVSQNYPIVQNAQGQMXHQAISPRTLNAWVKVVEEKAFSPEVIPMFSALSEGATPQDLNTMLNTVGGHQAAMQMLKETINXEAAEWDRLHPXHAGPIAPGQMREPRGSDIAGTTSTLQEQIGWMTXNPPIPVGEIYKRWIIMGLNKIVXMYSPTSILDIKQGPKEXFRDYVDRFYKTLRAEQATQEVKNWMTETLLVQNANPDCKTILKALGPXATLEEMMTAXQGVGGPAHKARVLAEAMGQVTNSNIIMMQKGNFRNQRXTVKCFNCGREGHIARNCKAPRKKGCWKCGREGHQMKDCXERQANFLGKIWPSHKXRPXNXLQSRPEPTAPPEESFRFGEETATPXQKQXPIDKELYPLASLXSLFGNDPSSX

SEQ ID NO: 149 - protein, 503 aa, Human immunodeficiency virus
  misc_feature (21)..(21): Xaa can be any naturally occurring amino acid
  misc_feature (24)..(24): Xaa can be any naturally occurring amino acid
  misc_feature (56)..(56): Xaa can be any naturally occurring amino acid
  misc_feature (138)..(138): Xaa can be any naturally occurring amino acid
  misc_feature (149)..(149): Xaa can be any naturally occurring amino acid
  misc_feature (157)..(157): Xaa can be any naturally occurring amino acid
  misc_feature (183)..(183): Xaa can be any naturally occurring amino acid
  misc_feature (212)..(212): Xaa can be any naturally occurring amino acid
  misc_feature (263)..(263): Xaa can be any naturally occurring amino acid
  misc_feature (282)..(282): Xaa can be any naturally occurring amino acid
  misc_feature (286)..(286): Xaa can be any naturally occurring amino acid
  misc_feature (388)..(388): Xaa can be any naturally occurring amino acid
  misc_feature (392)..(392): Xaa can be any naturally occurring amino acid
  misc_feature (401)..(401): Xaa can be any naturally occurring amino acid
  misc_feature (446)..(446): Xaa can be any naturally occurring amino acid
  misc_feature (462)..(462): Xaa can be any naturally occurring amino acid
  misc_feature (472)..(472): Xaa can be any naturally occurring amino acid
MGARASVLSGGELDRWEKIRXRPXGKKTYKLKHIVWASRELERFAVNPGLLETSDXCRQILGQLQPSLQTGSEELKSLYNTIAVLYCVHQRIQVKDTKEALDQIEEEQNRCKKKAQQAAADTGNSSQVSQVSQNYPIXQNMQGQMVHQXISPRTLNXWVKVVEEKAFSPEVIPMFTALSEGAXPQDLNTMLNTVGGHQAAMQMLKDTINEEXAEWDRLHPVHAGPVAPGQMREPRGSDIAGTTSTLQEQIGWMTSNPPMPVGXIYKRWIILGLNKIVRMYSXTSIXDIKQGPKEPFRDYVDRFYKTLRAEQASADVKGWMTETLLVQNANPDCKTILKALGPGATLEEMMTACQGVGGPGHKARVLAEAMSQVTNSATIMMQKGNFRXQRKXVKCFNCGKXGHIAKNCRAPRKRGCWKCGKEGHQMKDCTERQANFLGKIWPSHKXRPGNFLQSRPEPTAPXEESFRFGEEXATPSQKQEPIDKELYPLASLKSLFGNDHSSQ

SEQ ID NO: 150 - protein, 500 aa, Human immunodeficiency virus
  misc_feature (12)..(12): Xaa can be any naturally occurring amino acid
  misc_feature (63)..(63): Xaa can be any naturally occurring amino acid
  misc_feature (65)..(65): Xaa can be any naturally occurring amino acid
  misc_feature (77)..(77): Xaa can be any naturally occurring amino acid
  misc_feature (88)..(88): Xaa can be any naturally occurring amino acid
  misc_feature (114)..(114): Xaa can be any naturally occurring amino acid
  misc_feature (151)..(151): Xaa can be any naturally occurring amino acid
  misc_feature (179)..(179): Xaa can be any naturally occurring amino acid
  misc_feature (295)..(295): Xaa can be any naturally occurring amino acid
  misc_feature (342)..(342): Xaa can be any naturally occurring amino acid
  misc_feature (386)..(386): Xaa can be any naturally occurring amino acid
  misc_feature (460)..(460): Xaa can be any naturally occurring amino acid
  misc_feature (465)..(465): Xaa can be any naturally occurring amino acid
  misc_feature (487)..(487): Xaa can be any naturally occurring amino acid
MGARASVLSGGXLDQWEKIRLRPGGKKKYKLKHIVWASRELERFAVNPGLLETSEGCRQILGXLXPSLQTGSEELKXLFNTVATLYCXHQRIDVKDTKEALEKIEEEQNKSKKXAQQAAADTEKSSQVSQNYPIVQNLQGQMVHQAISPRXLNAWVKVVEEKAFSPEVIPMFSALSEGXTPQDLNTMLNTVGGHQAAMQMLKETINEEAAEWDRLHPVHAGPIAPGQMREPRGSDIAGTTSTLQEQVAWMTANPAIPVGEIYKRWIILGLNKIVRMYSPTSILDIRQGPKEPFRXYVDRFYRTLRAEQASQEVKNWMTETLLVQNANPDCKTILKALGPAAXLEEMMTACQGVGGPSHKARVLAEAMSQAQTPNSIMMQRGNFRNXRKNVKCFNCGKEGHIAKNCRAPRKKGCWKCGKEGHQMKDCNERQANFLGKIWPSYKGRPGNFLQSRPEPSAPPXESFRXGEETTTPPQKQEPIDKEQYPLXSLRSLFGNDPSST

SEQ ID NO: 151 - protein, 503 aa, Human immunodeficiency virus
  misc_feature (67)..(67): Xaa can be any naturally occurring amino acid
  misc_feature (220)..(220): Xaa can be any naturally occurring amino acid
  misc_feature (257)..(257): Xaa can be any naturally occurring amino acid
  misc_feature (442)..(442): Xaa can be any naturally occurring amino acid
  misc_feature (465)..(465): Xaa can be any naturally occurring amino acid
MGARASVLSGGDLDRWEKIRLRPGGKKQYKLKHLVWASRELERFAVNPGLLETAEGCRQILEQLQPXLQTGSEELKSLYNTVAVLYCVHQRIKVADTKEALEKLEEEQNKSKKKTQQAAAAATGTGNSSQVSQNYPIVQNLQGQMVHQAISPRTLNAWVKVVEEKAFSPEVIPMFSALSEGATPQDLNTMLNTVGGHQAAMQMLKETINEEAAEWDRVHXVHAGPIAPGQMREPRGSDIAGTTSTLQEQIGWMTNNXPIPVGEIYKRWIILGLNKIVRMYSPTSILDIRQGPKEPFRDYVDRFYKTLRAEQASQEVKNWMTETLLVQNANPDCKTILKALGPAATLEEMMTACQGVGGPGHKARVLAEAMSQVTNSASIMMQRGNFRNQRKAVKCFNCGKEGHIARNCRAPRKKGCWKCGKEGHQMKDCTERQANFLGKIWXSHKGRPGNFLQSRPEPTAPPAEXFRFGEETTTPSQKQEPIDREVYPLTSLRSLFGNDPSSQ

SEQ ID NO: 152 - protein, 500 aa, Human immunodeficiency virus
  misc_feature (27)..(27): Xaa can be any naturally occurring amino acid
  misc_feature (78)..(78): Xaa can be any naturally occurring amino acid
  misc_feature (123)..(123): Xaa can be any naturally occurring amino acid
  misc_feature (191)..(191): Xaa can be any naturally occurring amino acid
  misc_feature (219)..(219): Xaa can be any naturally occurring amino acid
  misc_feature (246)..(246): Xaa can be any naturally occurring amino acid
  misc_feature (256)..(256): Xaa can be any naturally occurring amino acid
  misc_feature (363)..(363): Xaa can be any naturally occurring amino acid
  misc_feature (393)..(393): Xaa can be any naturally occurring amino acid
  misc_feature (443)..(443): Xaa can be any naturally occurring amino acid
  misc_feature (467)..(467): Xaa can be any naturally occurring amino acid
  misc_feature (470)..(470): Xaa can be any naturally occurring amino acid
  misc_feature (486)..(486): Xaa can be any naturally occurring amino acid
  misc_feature (490)..(490): Xaa can be any naturally occurring amino acid
  misc_feature (500)..(500): Xaa can be any naturally occurring amino acid
MGARASVLSGGELDKWERIRLRPGGKXTYQLKHIVWASRELERFAVNPGLLETSEGCRQILGQLHPSLQTGSEELKSXYNTIAVLYCVHQRIEIRDTKEALDKIEEEQNKSKKKAQPAAADTXNSSQVSQNYPIVQNMQGQMVHQSISPRTLNAWVKVVEEKAFSPEVIPMFAALSEGATPQDLNTMLNTXGGHQAAMQMLKETINEEAAEWDRLHPVXAGPVAPGQMRDPRGSDIAGTTSTLQEXIGWMTSNPPXQVGEIYKRWIILGLNKIVRMYSPTSILDIRQGPKEPFRDYVDRFYKTLRAEQASQEVKNWMTETLLVQNANPDCKTILKALGPAATLEEMMTACQGVGGPGHKARVXAEAMSQVTNTATIMAQRGNFRNQRKIVKCXNCGKEGHIARNCRAPRKKGCWKCGKEGHQMKDCTERQANFLGKIWPSHKXRPGNFLQNRPEPSAPPAESFKFGXETXTPPQKQDPIDKELYPXASLXSLFGNDPSSX

SEQ ID NO: 153 - protein, 508 aa, Human immunodeficiency virus
  misc_feature (97)..(97): Xaa can be any naturally occurring amino acid
  misc_feature (186)..(186): Xaa can be any naturally occurring amino acid
  misc_feature (310)..(310): Xaa can be any naturally occurring amino acid
MGARASVLSGGELDKWEKIRLRPGGKKKYRLKHLVWASRELERFAVNPGLLETSEGCRQILGQLQPSLQTGSEELKSLYNTVAVLYCVHQRIEIKDXKEALDKIEEEQNKSKKKAQQAAADTGNNSSQVSQNYPIVQNMQGQMVHQAISPRTLNAWVKVVEEKAFSPEVIPMFSALSEGATPQDLXTMLNTVGGHQAAMQMLKETINEEAAEWDRLHPVHAGPIAPGQMREPRGSDIAGTTSTLQEQIGWMTHNPPIPVGEIYKRWIILGLNKIVRMYSPTSILDIRQGPKEPFRDYVDRFYKTLRAEQXSQEVKNWMTETLLVQNANPDCKTILKALGPAATLEEMMTACQGVGGPSHKAKIMAEAMSQITNSAAIMMQKGNFRNQRKPVKCFNCGKEGHIARNCRAPRKRGCWKCGKEGHQMKDCTERQANFLGKIWPSHKGRPGNFLQNRPDPPAPRPEPSAPPMESFRFGEETTTPSQKKEEIDKELYPLASLKSLFGNDPLSQ

SEQ ID NO: 154 - protein, 500 aa, Human immunodeficiency virus
  misc_feature (254)..(254): Xaa can be any naturally occurring amino acid
MGARASVLSAGELDRWEKIRLRPGGKKQYRLKHLVWASRELERFAVNPGLLETSEGCRQILTQLQPSLQTGSEELKSLYNTVATIYCVHQKIDVKDTMEALEKIEEEQNRSKKKAQQAAATENSSQGQGSQNYPIVQNIQGQMVHQAISPRTLNAWVKVVEEKAFSPEVIPMFSALSEGATPQDLNTMLNTVGGHQAAMQMLKETINEEAAEWDRLHPVQAGPIAPGQIREPRGSDIAGTTSNLQEQIAWMTNXPPIPVGEIYKRWIILGLNKIVRMYSPTSILDIRQGPKEPFRDYVDRFYKTLRAEQASQEVKNWMTETLLVQNANPDCKTILKALGPAATLEEMMTACQGVGGPGHKARVLAEAMSQVTNSATTMMQRGNFRNPRKNVKCFNCGKEGHIARNCRAPRKKGCWKCGKEGHQMKDCTERQANFLGKIWPSHKGRPGNFLQSRPEPTAPPEESFRFGEEATPSQKQEPIDKELYPLASLRSLFGSDPSSQ

SEQ ID NO: 155 - protein, 499 aa, Human immunodeficiency virus
  misc_feature (27)..(27): Xaa can be any naturally occurring amino acid
  misc_feature (30)..(30): Xaa can be any naturally occurring amino acid
  misc_feature (41)..(41): Xaa can be any naturally occurring amino acid
  misc_feature (63)..(63): Xaa can be any naturally occurring amino acid
  misc_feature (65)..(65): Xaa can be any naturally occurring amino acid
  misc_feature (69)..(69): Xaa can be any naturally occurring amino acid
  misc_feature (79)..(79): Xaa can be any naturally occurring amino acid
  misc_feature (126)..(126): Xaa can be any naturally occurring amino acid
  misc_feature (136)..(136): Xaa can be any naturally occurring amino acid
  misc_feature (138)..(138): Xaa can be any naturally occurring amino acid
  misc_feature (197)..(197): Xaa can be any naturally occurring amino acid
  misc_feature (233)..(233): Xaa can be any naturally occurring amino acid
  misc_feature (268)..(268): Xaa can be any naturally occurring amino acid
  misc_feature (278)..(278): Xaa can be any naturally occurring amino acid
  misc_feature (306)..(306): Xaa can be any naturally occurring amino acid
  misc_feature (322)..(322): Xaa can be any naturally occurring amino acid
  misc_feature (361)..(361): Xaa can be any naturally occurring amino acid
  misc_feature (407)..(407): Xaa can be any naturally occurring amino acid
  misc_feature (449)..(449): Xaa can be any naturally occurring amino acid
  misc_feature (452)..(452): Xaa can be any naturally occurring amino acid
  misc_feature (476)..(476): Xaa can be any naturally occurring amino acid
  misc_feature (486)..(486): Xaa can be any naturally occurring amino acid
MGARASVLSGGKLDKWEKIRLRPGGRXQYXLKHLVWASREXERFAVNPGLLETGEGCKQILEXLXPALXTGSEELKSLXNTVATLYCVHQKIEVRDTKEALDKIEEEQNKSKKKAQQAAADAGNNXQVSQNYPIVXNXQGQMVHQAISPRTLNAWVKVVEEKAFSPEVIPMFSALSEGATPQDLNTMLNTVGGHQAXMQMLKETINEEAAEWDRLHPVHAGPIAPGQIREPRXSDIAGTTSTLQEQIAWMTNNPPIPVGEIYKRWIIXGLNKIVRMYXPTSILDIRQGPKEPFRDYVDRFYKTLRXEQASQEVKNWMTETLXVQNSNPDCKTILKALGPAATLEEMMTACQGVGGPGHKAXILAEAMSQVTNSATIMMQKGNFRNQRKIVKCFNCGKEGHIARNCRXPRKKGCWKCGKEGHQMKDCTERQANFLGKIWPSYKGRPGNFXQSXPEPTAPPAESFRFGEETTPPQKQXQIDKELYPSXSLRSLFGNDPSSQ

SEQ ID NO: 156 - protein, 500 aa, Human immunodeficiency virus
  misc_feature (375)..(375): Xaa can be any naturally occurring amino acid
MGARASVLSGGKLDKWEKIRLRPGGKKKYQLKHIVWASRELERFAVNPGLLETAEGCRQILGQLQPSLQTGTEELKSLYNTLAVLYCVHQNIEVKDTKEALDKIEEEQNQSKKKAQQATANTGNSNQVSQNYPIVQNLQGQMVHQAISPRTLNAWVKVIEEKAFSPEVIPMFTALSEGATPQDLNTMLNTVGGHQAAMQMLKDTINEEAAEWDRMHPVHAGPNAPGQMREPRGSDIAGTTSTLQEQIGWMTSNPPIPVGEIYKRWIILGLNKIVRMYSPTSILDIKQGPKEPFRDYVDRFYKTLRAEQASQDVKNWMTETLLVQNANPDCKTILKALGPAATLEEMMTACQGVGGPGHKARVLAEAMSQVTNSAXIMMQRGNFRNQRRIVKCFNCGKEGHIAKNCRAPRKKGCWKCGKEGHQMKDCTERQANFLGKIWPSHKGRPGNFLQSRPEPTAPPEESFRFGEETTTPSQKPEQADKELYPLVSLKSLFGNDPSSQ

SEQ ID NO: 157 - protein, 507 aa, Human immunodeficiency virus
  misc_feature (317)..(317): Xaa can be any naturally occurring amino acid
  misc_feature (386)..(386): Xaa can be any naturally occurring amino acid
MGARASVLSGGELDRWEKIRLRPGGKKKYQLKHIVWASRELERFAVNPGLLETSEGCRQILGQLQPSLQTGSEELRSLYNTIATLYCVHQRIDVKDTKEALEKIEEEQNKSKKKAQQAAANTGNSSQGSQSGSQGSQNYPIVQNIQGQMVHQAISPRTLNAWVKVIEEKAFSPEVIPMFSALSEGATPQDLNTMLNTVGGHQAAMQMLKETINEEAAEWDRLHPVPAGPVAPGQMREPRGSDIAGTTSTLQEQIGWMTNNPPIPVGEIYKRWIILGLNKIVRMYSPVSILDIRQGPKEPFRDYVDRFYKTLRAEQAXQEVKNWMTETLLVQNANPDCKTILKALGPAATLEEMMTACQGVGGPGHKARVLAEAMSQVTNPTTIMMXRGNFRNQRKTIKCFNCGKEGHLARNCRAPRKKGCWKCGKEGHQMKDCTERQANFLGKIWPSHKGRPGNFLQSRPEPTAPPEESFRFGEETTTPSQKQETIDKEMYPITSLKSLFGNDPSSQ

SEQ ID NO: 158 - protein, 504 aa, Human immunodeficiency virus
MGARASVLSGGELDKWEKIRLRPGGKKKYRLKHVVWASRELERFAVNPGLLETSEGCRQILEQLQPSLQTGSEELRSLFNTVAVLYCVHQKIEVKDTKEALDKIEEEQNKSKKKAQQAEADTGNRNQVSQNYPIVQNMQGQMVHQAISPRTLNAWVKVVEEKAFSPEVIPMFSALSEGATPQDLNTMLNTVGGHQAAMQMLKETINEEAAEWDRLHPVHAGPIAPGQMREPRGSDIAGTTSTLQEQIGWMTNNPPIPVGEIYKRWIILGLNKIVRMYSPTSILDIKQGPKEPFRDYVDRFYKTLRAEQATQEVKNWMTETLLVQNANPDCKTILKALGPAATLEEMMTACQGVGGPGHKARVLAEAMSQVTNPTAIMIQKGNFRNQRRTVKCFNCGKEGHIAKNCRAPRKKGCWKCGKEGHQMKDCTERQANFLGKIWPSHKGRPGNFLQNRPENRPEPTAPPAESFRFGEETMAPSQKQEPTDKELYPLASLRSLFGNDPSSQ

SEQ ID NO: 159 - protein, 500 aa, Human immunodeficiency virus
  misc_feature (161)..(161): Xaa can be any naturally occurring amino acid
  misc_feature (264)..(264): Xaa can be any naturally occurring amino acid
MGARASVLSGEKLGNWERIRLRPGGKKRYRLKHIVWASRELERFAVNPSLLETSEGCRQILGQLQPALQTGSEELKSLYNTVATLYCVHQNIEVRDTKEALDKIEEEQNKCKKKAQQAAAGTGNSSQASQNYPIVQNMQGQMVHQPISPRTLNAWVKVVEXKAFSPEVIPMFTALSEGATPQDLNTMLNTVGGHQAAMQMLKETINEEAAEWDRLHPVHAGPIAPGQMREPRGSDIAGTTSTLQEQIGWMTNNPPIPVGEIYKXWIVMGLNKIVRMYSPTSILDIKQGPKEPFRDYVDRFYKVLRAEQASQDVKNWMTETLLVQNANPDCKTILKALGPAATLEEMMTACQGVGGPGHKARVLAEAMSQVTHPTTIMMQKGNFGNQRKMVKCFNCGKAGHIARNCRAPRKKGCWKCGKEGHQMKDCTERQANFLGKIWPSHKGRPGNFLQNRPEPSAPPEESFRFGEETATPSQKQEPIDKELYPLASLKSLFGNDPSSQ

SEQ ID NO: 160 - protein, 498 aa, Human immunodeficiency virus
MGARASVLSGGKLDQWEKIRLRPGGKKKYKLKHIVWASRELERFAVNPGLLETSEGCRQILGQLQPALQTGSEELKSLYNTVAVLYCVHQRIDVKDTKEALDKIEEEQSKSKKKAQQAAAAADTGNSSQNYPIVQNIQGQMVHQPISPRTLNAWVKVVEEKAFSPEVIPMFSALSEGATPQDLNTMLNTVGGHQAAMQMLKETINEEAAEWDRLHPVHAGPIAPGQMREPRGSDIAGTTSTLQEQIAWMTNNPPIPVGDIYKRWIILGLNKIVRMYSPTSILDIKQGPKEPFRDYVDRFYKILRAEQASQEVKNWMAETLLVQNANPDCKTILKALGPAATLEEMMTACQGVGGPGHKARVLAEAMSQVANPPTIMIQKGNFRNQRKIIKCFNCGKEGHLARNCKAPRKRGCWKCGKEGHQMKDCTERQANFLGKIWPSHKGRPGNFLQSRPEPTAPPEESFRFGEETTTPQKQEPIDKELYPLASLRSLFGNDPSST

SEQ ID NO: 161 - protein, 500 aa, Human immunodeficiency virus
MGARASVLSGGKLDRWEKIRLRPMGRKKYKLKHLVWASRELERFAVNPDLLETSEGCKQILRQLQPALQTGSEELRSLYNTVATLYCVHQGIEIKDTKEALEKIEEEQNKSKEKAQQAAADTGKNSTVSQNYPIVQNMQGQMVHQPISPRTLNAWVKVVEEKAFSPEVIPMFSALSEGATPQDLNTMLNTVGGHQAAMQMLKETINEEAAEWDRVHPVHAGPVAPGQMREPRGSDIAGTTSTLQEQIGWMTNNPPIPVGEIYKRWIILGLNKIVRMYSPTSILDIRQGPKEPFRDYVDRFYKTLRAEQASQEVKNWMTETLLVQNANPDCKTILKALGPAATLEEMMSACQGVGGPSHKARVLAEAMSQVTNSASIMMQRGNFKNQRKIVKCFNCGKEGHIARNCRAPRKRGCWKCGKEGHQMKDCTERQANFLGKIWPSHKGRPGNFLQSRPEPTAPPEESFRFGEETTTPSQKQEPIDKERYPLTSLRSLFGNDPSSQ

SEQ ID NO: 162 - protein, 510 aa, Human immunodeficiency virus
MGARASVLSGGELDRWEKIRLRPGGKKKYKLKHVVWASRELERFAVNPGLLETAGGCRQILEQLQPSLQTGSEELKSLFNTVAVLYCVHQRIDVKDTKEALDKIEEEQNKSKKKAQQAAADTGNSSHTGNSGQVSQNYPIVQNLQGQMVHQALSPRTLNAWVKVVEEKAFSPEVIPMFTALSEGATPQDLNTMLNTVGGHQAAMQMLKETINEEAAEWDRLHPVHAGPIAPGQMREPRGSDIAGTTSTLQEQIGWMTHNPPIPVGEIYKRWIIMGLNKIVRMYSPTSILDIKQGPKEPFRDYVDRFYKTLRAEQATQEVKNWMTETLLVQNANPDCKTILKALGPGATLEEMMTACQGVGGPAHKARVLAEAMSQVTNSATVMMQKGNFRNQRKTIKCFNCGKEGHIAKNCRAPRKRGCWKCGKEGHQMKDCTERQANFLGKIWPSHKGRPGNFLQSRPESRPEPTAPPEECFRFGEETTAPPQKQEPIDKELYPLASLKSLFGNDPSSQ

SEQ ID NO: 163 - protein, 503 aa, Human immunodeficiency virus
MGARASVLSGGKLDKWEKIRLRPGGKKKYQLKHIVWASRELERFAVNPGLLETSEGCRQILGQLQPSLQTGTEELRSLFNTVATLYCVHQGIEIKDTREALDKVEEEQNKSKKKVQQTADGTGNSSQASQNYPIVRNLQGQLTHQAISPRTLNAWVKVVEEKAFSPEVIPMFSALSEGATPQDLNTMLNTVGGHQAAMQMLKETINEEAAEWDRLHPVHAGPIAPGQMREPRGSDIAGTTSTLQEQIDWMTNNPPIPVGEIYKRWIIMGLNKIVRMYSPTSILDIKQGPKEPFRDYVDRFYKTLRAEQASQEVKNWMTETLLVQNANPDCKTILKALGPAATLEEMMTACQGVGGPGHKARVLAEAMSQVTGSATIMMQKGNIRSQRKTVKCFNCGKEGHIARNCRAPRKRGCWKCGKEGHQMKDCTERQANFLGKIWPSHKGRPGNFLQNRPEPTAPPAPPEESFRFGEETTAPSQKQEPINKELYPLTSLRSLFGNDPSSQ

SEQ ID NO: 164 - protein, 503 aa, Human immunodeficiency virus
MGARASVLSGGELDRWEKIRLRPGGKKTYKLKHIVWASRELERFAVNPGLLETSQGCRQILGQLQPSLPTGSEELRSLYNTIAVLYCVHQRIEVKDTKEALDKIEEEQNKGKKQAQQAAADTGSSSKVSQNYPIVQNIQGQMVHQPISPRTLNAWVKVVEEKAFSPEVIPMFSALSEGATPQDLNTMLNTVGGHQAAMQMLKETINEEAADWDRLHPVHAGPVAPGQMREPRGSDIAGTTSTLQEQIGWMTNNPPIPVGEIYKRWIILGLNKIVRMYSPASILDIRQGPKEPFRDYVDRFYKTLRAEQASQEVKNWMTETLLVQNANPDCKTILKALGPGATLEEMMTACQGVGGPGHKARVLAEAMSQVTNSATIMMQKGNFRNQRKPIKCFNCGKEGHLARNCRAPRKRGCWKCGKEGHQMKDCTERQANFLGKIWPSNKGRPGNFPQGRLTPTAPPAPPEESFRFGEETTNPSQRQEPIDQERYPLTSLRSLFGNDPSSQ

SEQ ID NO: 165 - protein, 501 aa, Human immunodeficiency virus
MGARASVLSGGKLDKWEKIRLRPGGKKQYQLKHIVWASRELERFALNPGLLETSEGCRQILGQLQSSLPTASEELRSLYNTVAVLYCVHQNIEVKDTKEALDKIEEEQNKSKKKAQPATAADTGSSSTVSQNYPIVQNLQGQMVHQAISPRTLNAWVKVVEEKAFSPEVIPMFSALSEGATPQDLNTMLNTVGGHQAAMQMLKETINEEAAEWDRLHPVHAGPIAPGQMREPRGSDIAGTTSNLQEQIGWMTNNPPIPVGEIYKRWIILGLNKIVRMYSPTSILDIKQGPKEPFRDYVDRFYKTLRAEQASQEVKNWMTETLLVQNANPDCKTILKALGPAATLEEMMTACQGVGGPGHKARVLAEAMSQVTGSANVMMQRGNFKNQRKTVKCFNCGREGHIARNCRAPRKKGCWKCGKEGHQMKDCTERQANFLGKIWPSHKGRPGNFLQSRPEPTAPPAESFRFGEETTTPSQKQEPIDKELYPLASLKSLFGNDPSSQ

SEQ ID NO: 166 - protein, 508 aa, Human immunodeficiency virus
MGARASILSGGELDRWEKIRLRPGGKKKYRLKHLVWASRELERFAVNPGLLETAEGCRQILEQLQPSLQTGSEELKSLFNTVAVLFCVQRRIDVKDTKEALDKIEEEQNKSKKKAQQAAAQQAAADTRNSSQVSQNYPIVQNLQGQMVHQAISPRTLNAWVKVVEEKAFSPEVIPMFSALSEGATPQDLNTMLNTVGGHQAAMQMLKETINEEAAEWDRLHPVHAGPIAPGQMREPRGSDIAGTTSTLQEQIGWMTNNPPIPVGEIYKRWIILGLNKIVRMYSPTSILDIKQGPKEPFRDYVDRFYKILRAEQASQEVKNWMTETLLVQNANPDCKTILKALGPAATLEEMMTACQGVGGPGHKARVLAEAMSQVTNSATIMMQRGNFKNQRKTVKCFNCGKEGHIARNCRAPRKKGCWKCGKEGHQMKNCTERQANFLGKIWPSHKGRPGNFLQSRPEPTAPPAPPEESFRFGEETATPPQRQEQRDEEKYPLTSLRSLFGNDPSSQ

SEQ ID NO: 167 - protein, 503 aa, Human immunodeficiency virus
MGARASILSGGKLDRWEKIRLRPGGKKRYKLKHLVWASRELERFAVNPGLLETSEGCKQILAQLQPSLQTGSEELKSLYNTVATLYCVHQNIEIKDTKEALDKIEEEQNKSKKKAQAAQQAAAGTGDSSQVSQNYPIVQNLQGQMVHQAISPRTLNAWVKVVEEKAFSPEVIPMFSALSEGATPQDLNTMLNTVGGHQAAMQMLKETINEEAAEWDRLHPAQAGPIAPGQIREPRGSDIAGTTSTLQEQITWMTNNPPIPVGEIYKRWIILGLNKIVRMYSPTSILDIRQGPKEPFRDYVDRFYKTLRAEQASQEVKNWMTETLLVQNANPDCKTILKALGPAATLEEMMTACQGVGGPGHKARVLAEAMSQVTNSATIMMQRGNFRSQRKTIKCFNCGKEGHTAKNCRAPRKRGCWKCGKEGHQMKDCTERQANFLGKIWPSHKGRPGNFLQNRPEPTAPPEESFRFGEETTATPPQKQEPIDREVYPLTSLRSLFGNDPSS

SEQ ID NO: 168 - protein, 501 aa, Human immunodeficiency virus
MGARASVLSGGELDKWERIRLRPGGRKQYKLKHIVWASRELERFALNPGLLETSEGCRQLLGQIQPSLQTGSEELRSLYNTIATLYCVHQKIDVKDTKEALDKIEEEQNKCKKKAQQAAADSGNSSQVSQNYPIVQNLQGQMVHQAISPRTLNAWVKVVEEKAFSPEVIPMFSALSEGATPQDLNTMLNTVGGHQAAMQMLKETINEEAAEWDRLHPPQAGPVAPGQMREPRGSDIAGTTSTLQEQIGWMTSNPPIPVGEIYKRWIILGLNKIVRMYSPTSILDIRQGPKEPFRDYVDRFYKTLRAEQASQEVKNWMTETLLVQNANPDCKTILKALGPAATLEEMMTACQGVGGPGHKARVLAEAMSQVTNSSAAMMMQRGNFRNSRKPIKCFNCGKEGHIARNCRAPRKKGCWKCGKEGHQMKDCTERQANFLGKIWPSHKGRPGNFLQNRPEPTAPPAESFRFGEETTTPSQKPEPIDRELYPLASLKSLFGNDPSSQ

SEQ ID NO: 169 - protein, 500 aa, Human immunodeficiency virus
MGARASVLSGGQLDKWEKIRLRPGGKKKYRLKHIVWASRELERFAVNPGLLETSEGCRQILGQLQPSLQTGSEELRSLFNTIATLYCVHQGIEVKDTKEALEKIEEEQNKSKKKTQQAAAGAGNSSQVSQNYPIVQNLQGQMVHQAISPRTLNAWVKVVEEKAFSPEVIPMFSALSEGATPQDLNTMLNTVGGHQAAMQMLKETINEEAAEWDRLHPVQAGPVAPGQLREPRGSDIAGTTSTLQEQIGWMTHNPPIPVGEIYKRWIIMGLNKVVRMYSPTSILDIRQGPKEPFRDYVDRFYKTLRAEQASQEVKNWMTETLLVQNANPDCKTILKALGPAATLEEMMTACQGVGGPGHKARVLAEAMSQATSSATIMMQKGNFRTQRRIVKCFNCGKEGHIAKNCRAPRKKGCWKCGKEGHQMKDCTERQANFLGKIWSSHKGRPGNFLQNRPEPTAPPEESFRFGEETTTPSQKQEPIDKELYPLVSLKSLFGNDPSSQ

SEQ ID NO: 170 - protein, 501 aa, Human immunodeficiency virus
MGARASVLSGGQLDRWEKIRLRPGGKKKYKLKHIVWASRELERFAVNPGLLETPEGCRQILGQLQPSLQTGSEELKSLYNTVATLYCVHQKIDVKDTKEALEKIEEEQNKSKKKAQQAAADAGNNSQVSQNFPIVQNLQGQMVHQAISPRTLNAWVKVVEEKAFSPEVIPMFSALSEGATPQDLNTMLNTVGGHQAAMQMLKETINEEAAEWDRLHPVHAGPIAPGQMREPRGSDIAGTTSTLQEQIGWMTNNPPIPVGEIYKRWIILGLNKIVRMYSPVSILDIRQGPKEPFRDYVDRFYKTLRAEQASQDVKNWMTETLLVQNANPDCKTILKALGPAATLEEMMTACQGVGGPGHKARVLAEAMSQATNNSVSIMMQRGNFRNQRKIVKCFNCGKEGHIAKNCRAPRKKGCWKCGREGHQMKDCTERQANFLGKIWPSRKGRPGNFLQSRPEPTAPPEESFRFGEETATPSQKQDPIDKELYPLASLKSLFGNDPSSQ

SEQ ID NO: 171 - protein, 503 aa, Human immunodeficiency virus
MGARASVLSGGELDRWEKIRLRPGGKKRYKLKHIVWASRELERFAVNPGLLETSEGCRQILGQLQPSLQTGSEELKSLFNTVAVLYCVHQRIEVKDTKEALDKIEEEQNKIKKRVQQAAADTGNSNSSQVVSQNYPIVQNLQGQMVHQALSPRTLNAWVKVIEEKAFSPEVIPMFSALSEGATPQDLNTMLNTVGGHQAAMQMLKETINEEAAEWDRLHPVHAGPIAPGQMREPRGSDIAGTTSTLQEQIGWMTHNPPIPVGEIYKRWIILGLNKIVRMYSPVSILDIRQGPKEPFRDYVDRFYKTLRAEQASQEVKNWMTETLLVQNANPDCKTILKALGPAATLEEMMTACQGVGGPGHKARVLAEAMSQVTNPANIMMQRGNFRNQRKTVKCFNCGKEGHIAKNCRAPRKKGCWKCGKEGHQIKDCTERQANFLGRIWPSNKGRPGNFLQSRPEPTAPPEESFRFGEETATPPQKQEPIDKELYPLASLRSLFGSDPSSQ

SEQ ID NO: 172 - protein, 503 aa, Human immunodeficiency virus
MGARASVLSGGQLDRWEKIRLRPGGKKQYKLKHIVWASRELERFAVNPSLLETSEGCRQILGQLQPSLQTGSEELKSLYNTVAVLYCVHQRIDVKDTKEALEKIEEEQNKIKKRTQQAAADTGNNSPVSQNYPIVQNMQGQMVHQAISPRTLNAWVKVIEEKNFSPEVIPMFSALSEGATPQDLNTMLNTIGGHQAAMQMLKETINDEAAEWDRLHPAQAGPAAPGQVREPRGSDIAGTTSTLQEQIAWMTHNPPIPVGEIYKRWIILGLNKIVRMYSPTSILDIRQGPKEPFRDYVDRFYKTLRAEQASQEVKNWMTETLLVQNSNPDCKTILKALGPAATLEEMMTACQGVGGPGHKARVLAEAMSQVQNSNSIMMQRGNFKNQRKSVKCFNCGKEGHIARNCRAPRKKGCWKCGKEGHQMKDCTERQANFLGKIWPSHKGRPGNFLQNRPEPTAPPEPTAPPEESFRFGEETTTPSQKQGPIDKELYPSASLRSLFGNDP

SEQ ID NO: 173 - protein, 500 aa, Human immunodeficiency virus
MGARASVLSGGKLDTWEKIRLRPGGKKKYQLKHIVWASRELERFAVNPGLLETSEGCRQILGVLQPSLQTGSEELRSLYNTVATLYCVHQGIEVRDTKEALEKVEEEQNKKKNAQQAAADTGNSSKPVSQNYPIVQNLQGQMVHQAISPRTLNAWVKVVEEKAFSPEVIPMFSALSEGATPQDLNTMLNTVGGHQAAMQMLKETINEEAAEWDRLHPVHAGPIAPGQMREPRGSDIAGTTSTLQEQIGWMTHNPPIPVGEIYKRWIILGLNKIVRMYSPTSILDIRQGPKEPFRDYVDRFYKTLRAEQASQEVKNWMTETLLVQNANPDCKTILKALGPAATLEEMMTACQGVGGPGHKARILAEAMSQVTNPTTIMMQRGNFKNQRKIVKCFNCGKEGHIARNCRAPRKKGCWKCGKEGHQMKDCTERQANFLGKIWPSYKGRPGNFLQSRPEPTAPPEESFRFGEETTTPPQKQEPIDKELYPLTSLKSLFGSDPSSQ

SEQ ID NO: 174 - protein, 500 aa, Human immunodeficiency virus
MGARASVLSGGELDRWEKIRLRPGGKKRYKLKHIVWASRELERFAVNPGLLETSEGCRQILGQLQPSLQTGSEELKSLYNTIAVLYCVHQRIEVKDTKEALDKIEEEQNKSKKKAQQAAADTGNSSPVSQNYPIVQNLQGQMVHQTISPRTLNAWVKVIEEKAFSPEVIPMFSALSEGATPQDLNTMLNTVGGHQAAMQMLKETINEEAAEWDRTHPVHAGPIAPGQMREPRGSDIAGTTSTLQEQIGWMTHNPPIPVGEIYKRWIILGLNKIVRMYSPVSILDIRQGPKEPFRDYVDRFYKTLRAEQASQDVKNWMTETLLVQNANPDCKTILKALGPAATLEEMMTACQGVGGPGHKARVLAEAMSQVTNAPNIMMQRGNFRSQRRPVKCFNCGKEGHIAKNCRAPRKKGCWKCGREGHQMKDCTERQANFLGKIWPSHKGRPGNFLQNRPEPTAPPAESFRFGEETTTPPQKQELVDKELYPLASLKSLFGNDPSSQ

SEQ ID NO: 175 - protein, 503 aa, Human immunodeficiency virus
MGARASVLSGGQLDKWEKIRLRPGGKKQYKLKHIVWASRELERFAVNPGLLETAEGCRQILEQLQPALKTGSEELRSLFNTIAVLYCVHQKIEVKDTKEALDKIEEEQNKSKKRVQQAAAAAADTGNKSQVSQNYPIVQNLQGQMVHQALSPRTLNAWVKVVEEKAFSPEVIPMFTALSEGATPQDLNTMLNTVGGHQAAMQMLKETINEEAAEWDRVHPVHAGPVAPGQMREPRGSDIAGTTSNLQEQIAWMTSNPPIPVGEIYKRWIILGLNKIVRMYSPTSILDIRQGPKEPFRDYVDRFYKTLRAEQASQDVKNWMTETLLVQNANPDCKTILKALGPGATLEEMMTACQGVGGPGHKARVLAEAMSQVTNSPTVMMQKGNFRNQRKTVKCFNCGKEGHIAKNCRAPRKKGCWKCGREGHQMKDCTERQANFLGKIWPSHKGRPGNFLQSRPEPTAPPAESFGFGEETTAPPQKQEPIDKELYPLTSLKSLFGNDPSSQ

SEQ ID NO: 176 - protein, 511 aa, Human immunodeficiency virus
MGARASVLSGGELDRWEKIRLRPGGKKKYKLKHIVWASRELERFAVNPGLLETAQGCTQILGQLQPSLQTGSEELKSLYNTVATLYCVHQRIEVKDTKEALDKIEEEQNKSKKKAQQAAADTGNSSQVSQNYPIVQNLQGQMVHQAISPRTLNAWVKVVEEKAFSPEVIPMFTALSEGATPQDLNTMLNTVGGHQAAMQMLEETINEEAAEWDRLHPVHAGPIAPGQIREPRGSDIAGTTSTLAEQMAWITGNPPVPVGEIYKRWIIMGLNKIVRMYSPTSILDIRQGPKEPFRDYVDRFYKTLRAEQASQEVKNWMTETLLVQNANPDCRTILKALGPAATLEEMMTACQGVGGPGHKARVLAEAMSQVTNTTNIMMQKSNFRGQRKIVKCFNCGKEGHIAKNCRAPRKRGCWKCGKEGHQMKDCTERQANFLGKIWPSYKGRPGNFLQNRPEPTAPPPQSRLEPTAPPEESFRFGEETTALPQRQELIDKEQHHLASLRSLFGNDPLSQ

SEQ ID NO: 177 - protein, 505 aa, Human immunodeficiency virus
MGARASVLSGGKLDQWEKIRLRPGGKKKYHLKHIVWASRELERFAVNPGLLETSEGCRQILRQLQPSLQTGSEEFKSLYNTIAVLYCVHQRIEIKDTKEALDQIEEEQNKSKKKAQQAAAAADTGSGSSPASQNYPIVQNMQGQMVHQPISPRTLNAWVKVVEEKAFSPEVIPMFSALAEGATPQDLNTMLNTVGGHQAAMQMLKETINEEAAEWDRLHPAQAGPVAPGQVREPRGSDIAGTTSTLQEQIAWMTHNPPIPVGEIYKRWIILGLNKIVRMYSPTSILDIKQGPKEPFRDYVDRFYKTLRAEQASQEVKNWMTETLLVQNANPDCKTILKALGPAATLEEMMTACQGVGGPGHKARVLAEAMSQVTGSAATVMMQRGNFKNQRKSVKCFNCGKEGHIARNCRAPRKKGCWKCGKEGHQMKDCTERQANFLGKIWPSHKGRPGNFLQSRPEPTAPPAESFRFGEETTTPSQKQELVDKEMYPPLTSLRSLFGNDPSSQ

SEQ ID NO: 178 - protein, 500 aa, Human immunodeficiency virus
MGARASVLSGGELDRWEKIRLRPGGKKQYKLKHIVWASRELERFAVNPGLLETAEGCRKILEQLQPSLQTGSEELQSLHNTIAVLYCVHQRIDVKDTKEALEKIEEEQNKIKKRAQQAAADTKNSSQVSQNYPIVQNLQGQMVHQPISPRTLNAWVKVVEEKAFSPEVIPMFTALSEGATPQDLNTMLNTVGGHQAAMQMLKETINEEAAEWDRLHPVHAGPIAPGQMREPRGSDIAGTTSNLQEQIGWMTSNPPIPVGEIYKRWIILGLNKIVRMYSPTSILDIRQGPKEPFRDYVDRFYKTLRAEQASQDVKNWMTETLLVQNANPDCRTILKALGPAATLEEMMTACQGVGGPGHKARVLAEAMSQVTNSATVMMQRGNFRNQRKIVKCFNCGKEGHIARNCRAPRKKGCWKCGQEGHQMKDCTGRQANFLGKIWPSNKGRPGNFLQSRPEPSAPPEESFRFAEETATPPQKREPIDKELYPLASLKSLFGNDPSSQ

SEQ ID NO: 179 - protein, 501 aa, Human immunodeficiency virus
MGARASVLSGGKLDKWERIRLRPGGKKKYRLKHIVWASRELERFAVNPGLLETAEGCRQTLGALQPSLQTGSEELRSLYNTVAVLYCVHQNIEIRDTKEALDRVEEEQNKSKKRTQQAAADTGNSSQVSQNYPIVQNLQGQMVHQAISPRTLNAWVKVVEEKAFSPEVIPMFSALSEGATPQDLNTMLNTVGGHQAAMQMLKETINEEAAEWDRLHPVHAGPIAPGQMREPRGSDIAGTTSTLQEQIGWMTNNPPIPVGEIYKRWIILGLNKIVRMYSPTSILDIRQGPKEPFRDYVDRFYKTLRAEQASQEVKNWMTETLLVQNANPDCKTILKALGPAATLEEMMTACQGVGGPSHKARVLAEAMSQTTSTNIMMQRGNFRNQRKPVKCFNCGKEGHIAKNCRAPRKKGCWKCGQEGHQMKDCTERQANFLGKIWPSSKGRPGNFLQSRPEPTAPPEESFRFGEETMAAAPSQKQEPKDKELYPLASLKSLFGNDPLSQ

SEQ ID NO: 180 - protein, 501 aa, Human immunodeficiency virus
MGARASVLSGGKLDKWERIRLRPGGNKRYKLKHIVWASRELERFAVNPGLLETAEGCRQILGQLHPSLQTGSEELRSLYNTIATLYCVHQQIDVKDTKEALDKIEEEQNKSKNKAQQAAADTGSSSQNYPIVQNLQGQMVHQALSPRTLNAWVKVIEEKAFSPEVIPMFSALSEGATPQDLNTMLNTVGGHQAAMQMLKETINEEAAEWDRVHPVHAGPIAPGQLREPRGSDIAGTTSNLQEQIAWMTHNPPIPVGEIYKRWIILGLNKIVRMYSPVSILDIRQGPKEPFRDYVDRFYKTLRAEQATQEVKNWMTETLLVQNANPDCKTILKALGPGATLEEMMTACQGVGGPAHKARVLAEAMSQATGAAANIMMQKGNFRNQRRTVKCFNCGKEGHIAKNCRAPRKKGCWKCGEEGHQMKNCPGRQANFLGKVWPSHKGRPGNFLQSRPEPTAPSAPPAESFRFGEEMTAPSQKQETPKEELYPLASLKSLFGNDPSSQ

SEQ ID NO: 181 - protein, 500 aa, Human immunodeficiency virus
MGARASVLSGGELDRWEKIRLRPGGKKKYRLKHLVWASRELERFAVNPGLLETSEGCKQILGQLQPSLQTGSEELKSLYNAVAVLYCVHQRIDIKDTKEALEKIEEEQNKSKKKTQQAAADTGSSSQVSHNFPIVQNLQGQMVHQAISPRTLNAWVKVVEEKAFSPEVIPMFAALSEGATPQDLNTMLNTVGGHQAAMQMLKETINEEAAEWDRLHPVHAGPIAPGQMREPRGSDIAGTTSTLQEQIAWMTNNPPIPVGEIYKKWIIMGLNKIVRMYSPTSILDIRQGPKEPFRDYVDRFYKTLRAEQASQEVKNWMTETLLVQNANPDCKTILKALGPAATLEEMMTACQGVGGPSHKARVLAEAMSQTTNTTAMMMQRGNFKNQRKPVKCFNCGKEGHLARNCRAPRKKGCWKCGKEGHQMKDCTERQANFLGKIWPSYKGRPGNFLQSRPEPTAPPEESFRFGEEVATPVQKQEPIDKEMYPLTSLKSLFGNDPSSQ

SEQ ID NO: 182 - protein, 500 aa, Human immunodeficiency virus
MGARASVLSGGELDRWEKIRLRPGGKKKYKLKHIVWASRELERFAVNPGLLETSEGCKQILGELQPSLQTGSEELRSLFNTVAVLYCVHQRIAVKDTKEALEKIEEEQNKSKKKAQQAAADPGKNSQVSQNYPIVQNLQGQMVHQAISPRTLNAWVKVVEEKAFSPEVIPMFSALSEGATPQDLNTMLNTVGGHQAAMQMLKETINEEAAEWDRMHPVQAGPVAPGQMREPRGSDIAGTTSNLQEQIAWMTSNPPVPVGEIYKRWIIMGLNKIVRMYSPTSILDIRQGPKEPFRDYVDRFYKTLRAEQASQEVKHWMTETLLVQNANPDCKTILKALGPAATLEEMMTACQGVGGPGHKARVLAEAMSQVTNQNTIMMQRGNFRNQRKIIKCFNCGKEGHVARNCRAPRKKGCWKCGKEGHQMKDCTERQANFLGKIWPSHKGRPGNFLQSRPEPTAPPAESFRVGEETATPSQKQEPTDKELYPLTSLKSLFGSDPSSQ

SEQ ID NO: 183 - protein, 504 aa, Human immunodeficiency virus
  misc_feature (28)..(28): Xaa can be any naturally occurring amino acid
  misc_feature (48)..(48): Xaa can be any naturally occurring amino acid
  misc_feature (102)..(102): Xaa can be any naturally occurring amino acid
  misc_feature (130)..(130): Xaa can be any naturally occurring amino acid
  misc_feature (313)..(313): Xaa can be any naturally occurring amino acid
  misc_feature (372)..(372): Xaa can be any naturally occurring amino acid
  misc_feature (390)..(390): Xaa can be any naturally occurring amino acid
  misc_feature (431)..(431): Xaa can be any naturally occurring amino acid
  misc_feature (471)..(471): Xaa can be any naturally occurring amino acid
  misc_feature (482)..(482): Xaa can be any naturally occurring amino acid
  misc_feature (486)..(487): Xaa can be any naturally occurring amino acid
MGARASILSGGGLDRWEKIRLRPGGKKXYRLKHIVWASRELERFAVNXSLLETSEGCRQILGQLHPSLQTGSEELKSLYNTIAVLYCVHQRIDIKDTKEALXKIEEEQNKSKKKAQQAAADTGNSNGNSXQVSQNYPIVQNIQGQMVHQAISPRTLNAWVKVVEEKAFSPEVIPMFSALSEGATPQDLNTMLNTVGGHQAAMQMLKETINEEAAEWDRLHPVHAGPVAPGQMREPRGSDIAGTTSTLQEQIAWITNNPPIPVGEIYKRWIILGLNKIVRMYSPTSILDIRQGPKEPFRDYVDRFYKTLRAEQXSQEVKNWMTETLLVQNANPDCKTILKALGPGATLEEMMTACQGVGGPGHKARVLAEAMXQMTSSATIMMQRGNFRNXRRTVKCFNCGKEGHIAKNCRAPRKKGCWKCGKEGHQMKDCXERQANFLGKIWPSHKGRPGNFLQSRPEPTAPPEESFRFGXEKTTPSQKQEXIDKXXYPLASLKSLFGNDPSSQ

SEQ ID NO: 184 - protein, 499 aa, Human immunodeficiency virus
  misc_feature (325)..(325): Xaa can be any naturally occurring amino acid
MGARASVLSGGELDRWEKIRLRPGGKKKYRLKHIVWASRELERFAVNPGLLETSGGCRQILEQLQPSLQTGSEELKSLYNTVATLYCVHRKIDVRDTKEALEKVEEEQNKSKKAQQAAADTGNNRQVSQNYPIVQNLQGQMVHQPISPRTLNAWVKVVEEKAFSPEVIPMFSALAEGATPQDLNTMLNTVGGHQAAMQMLKETINEEAAEWDRVHPVHAGPIAPGQMREPRGSDIAGTTSTLQEQIGWMTNNPPIPVGEIYKRWIILGLNKIVRMYSPTSILDIRQGPKEPFRDYVDRFYKTLRAEQASQEVKNWMTETLLVQNXNPDCKTILKALGPAATLEEMMTACQGVGGPGHKARVLAEAMSQVTNSATIMMQRGNFKNQRKIVKCFNCGKEGHIARNCRAPRKKGCWKCGKEGHQMKDCMERQANFLGKIWPSHKGRPGNFLQNRPEPTAPPEESFRFGEETTTPPQKQEPIDKEQYPLTALRSLFGSDPSSQ

SEQ ID NO: 185 - protein, 500 aa, Human immunodeficiency virus
  misc_feature (11)..(11): Xaa can be any naturally occurring amino acid
  misc_feature (23)..(23): Xaa can be any naturally occurring amino acid
  misc_feature (69)..(69): Xaa can be any naturally occurring amino acid
  misc_feature (76)..(76): Xaa can be any naturally occurring amino acid
  misc_feature (79)..(79): Xaa can be any naturally occurring amino acid
  misc_feature (86)..(86): Xaa can be any naturally occurring amino acid
  misc_feature (95)..(95): Xaa can be any naturally occurring amino acid
  misc_feature (114)..(114): Xaa can be any naturally occurring amino acid
  misc_feature (373)..(373): Xaa can be any naturally occurring amino acid
  misc_feature (375)..(375): Xaa can be any naturally occurring amino acid
  misc_feature (383)..(383): Xaa can be any naturally occurring amino acid
  misc_feature (474)..(474): Xaa can be any naturally occurring amino acid
MGARASVLSGXKLDKWEKIRLRXGGKKKYRLKHIVWASRELERFAVNPGLLETSEGCKQILIQLQPSLXTGSEELXSLXNTIATLXCVHQNIEVXDTKEALERIEEEQNKSKTXAQQAAANTGNSSQVSQNYPIVQNLQGQMVHQPLSPRTLNAWVKVVEEKNFSPEVIPMFTALSEGATPQDLNTMLNTIGGHQAAMQMLKETINEEAAEWDRLHPVHAGPIAPGQMREPRGSDIAGTTSSLQEQIAWMTSNPPIPVGEIYKRWIILGLNKIVRMYSPISILDIRQGPKEPFRDYVDRFYKTLRAEQASQDVKNWMTETLLVQNANPDCKTILKALGPAATLEEMMTACQGVGGPGHKARVLAEAMSQVTNXTXVMMQRGNXRNQRKIIKCFNCGKEGHLARNCRAPRKKGCWKCGQEGHQMKDCTERQANFLGKIWPSHKGRPGNFLQSRPEPTAPPEESFRFGEETTTPSXKQEQIDKDLYPLASLKSLFGNDPSSQ

SEQ ID NO: 186 - protein, 499 aa, Human immunodeficiency virus
  misc_feature (114)..(114): Xaa can be any naturally occurring amino acid
  misc_feature (125)..(125): Xaa can be any naturally occurring amino acid
  misc_feature (400)..(400): Xaa can be any naturally occurring amino acid
  misc_feature (408)..(408): Xaa can be any naturally occurring amino acid
  misc_feature (418)..(418): Xaa can be any naturally occurring amino acid
  misc_feature (434)..(434): Xaa can be any naturally occurring amino acid
MGARASVLSGGELDKWEKIRLRPGGKKKYRLKHIVWASRELERFAVNPGLMETAEGCRQILGQLQPSLQTGSEELKSLYNTLAVLYCVHQKIEIKDTKEALDKIEEEQNKSKKXAQQAAADTGNXSQVSQNYPIVQNLQGQMVHQALSPRTLNAWVKVVEEKAFSPEVIPMFTALSEGATPQDLNTMLNTVGGHQAAMQMLKETINEEAAEWDRLHPVHAGPIAPGQMREPRGSDIAGTTSTLQEQIGWMTNNPPIPVGEIYKRWIILGLNKIVRMYSPVSILEIRQGPKEPFRDYVDRFYKTLRAEQASQDVKNWMTETLLVQNANPDCKTILKALGPAATLEEMMTACQGVGGPGHKARVLAEAMSQVTSSANIMMQRGNFRNRKPVKCFNCGKEGHXAKNCRAPXKRGCWKCGKXGHQMKDCTERQANFLXKIWPSHKGRPGNFLQNRPEPTAPPEESFRFGEETTTCSQKQEQIDKEMYPLTSLKSLFGNDPSSQ

SEQ ID NO: 187 - protein, 499 aa, Human immunodeficiency virus
  misc_feature (271)..(271): Xaa can be any naturally occurring amino acid
  misc_feature (356)..(356): Xaa can be any naturally occurring amino acid
MGARASVLSGGQLDRWEKIRLRPGGKKKYKLKHLVWASRELERFAVNPGLLESSEGCKQILAQLQPSLQTGSEELKSLFNTVSVLYCVHQRIDVKDTKEALEKIEEEQNKSKKKAQQAAADTGNSSSQVSQNYPIVQNLQGQMVHQPLSPRTLNAWVKVIEEKAFSPEVIPMFSALSEGATPQDLNTMLNTVGGHQAAMQMLKDTINEEAAEWDRLHPVQAGPIAPGQIREPRGSDIAGTTSNLQEQIAWMTRNPPIPVGDIYKRWIILGXNKIVRMYSPVSILDIRQGPKEPFRDYVDRFYKTLRAEQCTQDVKNWMTETLLVQNANPDCKTILKALGPAATLEEMMTACQGVGXPSHKARVLAEAMSKANSTTIMVQRGQFKNQRKIVKCFNCGKEGHIARNCRAPRKKGCWKCGQEGHQMKDCTERQANFLGKIWPSHKGRPGNFLQSRPEPTAPPVESFGFGEETATPPQKQEPDKDLYPLASLKSLFGNDPLSQ

SEQ ID NO: 188 - protein, 500 aa, Human immunodeficiency virus
  misc_feature (15)..(15): Xaa can be any naturally occurring amino acid
  misc_feature (190)..(190): Xaa can be any naturally occurring amino acid
  misc_feature (216)..(216): Xaa can be any naturally occurring amino acid
  misc_feature (269)..(269): Xaa can be any naturally occurring amino acid
MGARASVLSGGKLDXWEKIRLRPGGKKQYKLKHLVWASRELERFAVNPGLLETSDGCRQILGQLQPALKTGSEELKSLYNTVATLYCVHQNIEVRDTKEALDKIEEEQNKSKKKAQQAAADTGNGSQVSQNYPIVQNLQGQMVHQPISPRTLNAWVKVIEEKAFSPEVIPMFSALSEGATPQDLNTMLNXVGGHQAAMQMLKETINEEAAEWDRLXPAQAGPVAPGQMREPRGSDIAGTTSTLQEQIAWTTGNPAIPVGEIYKRWIILXLNKIVRMYSPISILDIRQGPKEPFRDYVDRFYKTLRAEQASQEVKNWMTETLLVQNANPDCKTILKALGPAATLEEMMTACQGVGGPGHKARVLAEAMSHLTNSAVMMQRGNFKNQRKTIKCFNCGKDGHLARNCRAPRKKGCWKCGKEGHQMKDCDERQANFLGKIWPSHKGRPGNFLQSRPEPTAPPAESFRFGEETATPPQKQEPIDKEPLYPSASLKSLFGNDPLLQ

SEQ ID NO: 189 - protein, 500 aa, Human immunodeficiency virus
MGARASILSGGALDRWEKIRLRPGGRKRYKLKHLVWASRELERFAVNPGLLETSEGCKQILGQLQPSLQTGSEELKSLFNTVAVLYCVHQRIEVKDTKEALEKIEEEQNKSKKKAQQAAADTGNSSQVSQNYPIVQNIQGQMVHQAISPRTLNAWVKVVEEKAFSPEVIPMFSALSEGATPQDLNTMLNTVGGHQAAMQMLKETINEEAAEWDRLHPVHAGPVAPGQMREPRGSDIAGTTSTLQEQIGWMTHNPPIPVGEIYKRWIILGLNKIVRMYSPASILDIRQGPKEPFRDYVDRFYKTLRAEQASQEVKNWMTETLLVQNANPDCKTILKALGPAATLEEMMTACQGVGGPGHKARVLAEAMSQVTNSATIMMQKGNFRNQRKTVKCFNCGKEGHIARNCRAPRKRGCWKCGKDGHQMKDCTERQANFLGKIWPSHKGRPGNFLQSRPEPTAPPEESIRFGEETTTPSQKQEQIDKEKYPLTSLRSLFGNDPSSQ

SEQ ID NO: 190 - protein, 500 aa, Human immunodeficiency virus
  misc_feature (58)..(58): Xaa can be any naturally occurring amino acid
  misc_feature (63)..(63): Xaa can be any naturally occurring amino acid
  misc_feature (79)..(79): Xaa can be any naturally occurring amino acid
  misc_feature (82)..(82): Xaa can be any naturally occurring amino acid
  misc_feature (90)..(90): Xaa can be any naturally occurring amino acid
  misc_feature (94)..(94): Xaa can be any naturally occurring amino acid
  misc_feature (122)..(122): Xaa can be any naturally occurring amino acid
  misc_feature (216)..(216): Xaa can be any naturally occurring amino acid
  misc_feature (268)..(268): Xaa can be any naturally occurring amino acid
  misc_feature (292)..(292): Xaa can be any naturally occurring amino acid
  misc_feature (307)..(307): Xaa can be any naturally occurring amino acid
  misc_feature (384)..(384): Xaa can be any naturally occurring amino acid
  misc_feature (389)..(389): Xaa can be any naturally occurring amino acid
  misc_feature (409)..(409): Xaa can be any naturally occurring amino acid
  misc_feature (462)..(462): Xaa can be any naturally occurring amino acid
  misc_feature (486)..(486): Xaa can be any naturally occurring amino acid
  misc_feature (488)..(488): Xaa can be any naturally occurring amino acid
MGARASVLSGGELDKWEKIRLRPGGKKKYKLKHIVWASRELERFAVNPGLLETSEGCXQILGXLQPSLQAGSEELKSLXNTXAVLYCVHXRIEXKDTKEALDKIEEEQNKSKKQAQQAAADXGNSSQVSQNYPIVQNLQGQMVHQPLSPRTLNAWVKVVEEKAFSPEVIPMFSALSEGATPQDLNTMLNTVGGHQAAMQMLKETINEEAADWDRLXPVHAGPIAPGQMREPRGSDIAGTTSTLQEQIGWMTNNPPIPVGEIYKRWIIXGLNKIVRMYSPTSILDIKQGPKEXFRDYVDRFYKTLRAXQASQEVKNWMTETLLVQNANPDCKTILKALGPAATLEEMMTACQGVGGPGHKARVLAEAMSQVTNPNTIMMQRGNFXNQRKXVKCFNCGKEGHIAKNCRAPXKRGCWKCGKEGHQMKDCTERQANFLGKIWPSHKGRPGNFLQSRPEPTAPPEEXFRFGEETATPPQKQEQTDKELYPXTXLRSLFGNDPLSQ

SEQ ID NO: 191 - protein, 503 aa, Human immunodeficiency virus
  misc_feature (207)..(207): Xaa can be any naturally occurring amino acid
MGARASVLSGGQLDRWEKIRLRPGGKKKYKLKHIVWASRELERFAVNPGLLESPEGCRQILGQLQPSLQTGSEELRSLYNTVATLYCVHQQIEVKDTKEALEKIEEEQNKSKKKAPQAQAAAADTGNRSQVSQNYPIVQNLQGQMVHQALSPRTLNAWVKVVEEKAFSPEVIPMFSALSEGATPQDLNTMLNTVGGHQAAMQMLKEXINEEAAEWDRMHPVHAGPIAPGQMREPRGSDIAGTTSTLQEQIGWMTNNPPIPVGEIYKRWIILGLNKIVRMYSPTSILDIRQGPKESFRDYVDRFYKTLRAEQASQEVKNWMTETLLVQNANPDCKTILKALGPGATLEEMMTACQGVGGPSHKARVLAEAMSQVTSPATVMMQRGNFRNQRKPVKCFNCGKDGHIARNCKAPRKKGCWKCGKEGHQMKDCPNRQANFLGKIWPSHKGRPGNFLQSRPEPTAPPEESFRFGEGTTTPPQKQELIDKDLYPSASLKSLFGNDPLLQ

SEQ ID NO: 192 - protein, 500 aa, Human immunodeficiency virus
MGARASVLSGGELDRWEKIRLRPGGKKRYKLKHIVWASRELERFAVNPGLLETSEGCRQILGQLQPALQTGSEELKSLFNTVATLYCVHQRIEIKDTKEALDKIEEEQNKSKKKAQQAAADTGSSSQSSQNYPIVQNIQGQMVHQAISPRTLNAWVKVVEEKAFSPEVIPMFSALSEGATPQDLNTMLNTVGGHQAAMQMLKETINEEAAEWDRLHPVHAGPIAPGQMREPRGSDIAGTTSTLQEQIGWMTNNPPIPVGEIYKRWIIMGLNKIVRMYSPTSILDIRQGPKEPFRDYVDRFYKTLRAEQASQEVKNWMTETLLVQNSNPDCKTILKALGPAATLEEMMTACQGVGGPGHKARVLAEAMSQVTNSTAIMMQRGNSRPQRKIVKCFNCGKEGHIARNCRAPRKRGCWKCGKEGHQMKDCTERQANFLGKIWPSHKGRPGNFIQNRLEPTAPPEEIFRFGEETTTPPQKQEPRDKEQYPLTSLRSLFGNDPSSQ

SEQ ID NO: 193 - protein, 507 aa, Human immunodeficiency virus
  misc_feature (166)..(166): Xaa can be any naturally occurring amino acid
  misc_feature (325)..(325): Xaa can be any naturally occurring amino acid
MGARASVLSAGELDKWEKIRLRPGGKKKYRLKHIVWASRELERFAVNPGLLETSEGCRQILGQLQPSLQTGSEELRSLFNTVATLYCVHQKIDVKDTKEALEKVEEEQNKSKKKTQQAAAGAGNSSQVSQVSQNYPIVQNLQGQMVHQAISPRTLNAWVKVVEEKXFSPEVIPMFSALSEGATPQDLNTMLNTVGGHQAAMQMLKETINEEAAEWDRLHPVHAGPIAPGQMREPRGSDIAGTTSTLQEQIGWMTNNPPIPVGEIYKRWIILGLNKIVRMYSPTSILDIRQGPKEPFRDYVDRFYKTLRAEQASQEVKNWMTETLXVQNANPDCKTILKALGPAATLEEMMTACQGVGGPGHKARVLAEAMSQVTGPAAVMMQRGNFRNQRKTVKCFNCGKEGHIAKNCRAPRKKGCWKCGKEGHQMKDCTERQANFLGKIWPSHKGRPGNFLQSRPEPTAPPAPPEEIFRFGEETTNPSQKQETMEKELYPPLASLKSLFGNDPSSQ

SEQ ID NO: 194 - protein, 503 aa, Human immunodeficiency virus
  misc_feature (493)..(493): Xaa can be any naturally occurring amino acid
MGARASVLSGGELDRWEKIRLRPGGKKKYRLKHLVWVSRELERFAVNPGLLETSEGCRQIIEQLPPSLPTGSEELRSVYNAVATLYCVHQRIDVKDTKEALDKIEEEQNKSKKKAQQAQQAAADTGNSRQVSQNFPIVQNLQGQMVHQPISPRTLNAWVKVIEEKAFSPEIIPMFSALSEGATPQDLNTMLNTVGGHQAAMQMLKETINEEAAEWDRVHPVHAGPVAPGQMREPRGSDIAGTTSTLQEQIGWMTHNPPIPVGDIYKRWIILGLNKIVRMYSPVSILDIRQGPKEPFRDYVDRFYKTLRAEQATQEVKNWMTETLLVQNANPDCKTILKALGPAATLEEMMTACQGVGGPGHKARVLAEAMSQVTNSATIMMQRGNVRNQRRIIKCFNCGKEGHIAKNCRAPRKKGCWKCGKEGHQMKDCTERQANFLGKIWPSHKGRPGNFLQSRPEPTAPPEESFRFGEETAAPSQKQETIDKEMYPITSLXSLFGNDPSSQ

SEQ ID NO: 195 - protein, 497 aa, Human immunodeficiency virus
MGARASVLSGGKLDRWEKIRLRPGGKKKYRLKHIVWASRELERFAVNPGLLETSGGCKQILNQLQPSLQTGSEELRSLYNTVATLYCVHQKIDVKDTKEALDKIEEEQNESKKKTQQAAAGTSQVSQNFPIVQNLQGQMVHQAISPRTLNAWVKVVEEKAFSPEVIPMFSALSEGATPQDLNTMLNTVGGHQAAMQMLKETINEEAAEWDRLHPVHAGPIAPGQMREPRGSDIAGTTSTLQEQIGWMTHNPPIPVGEIYKRWIILGLNKIVRMYSPSSILDIKQGPKEPFRDYVDRFYKTLRAEQASQEVKNWMTETLLVQNANPDCKTILKALGPAATLEEMMTACQGVGGPAHKARVLAEAMSQVTNPATTMMQRGNFRNQRRVIKCFNCGKEGHIAKNCRAPRKKGCWKCGQEGHQMKDCTERQANFLGKIWPSHKGRPGNFLQSRPEPTAPPAESFRFGEEITTPSQKQEPIDKELYPLASLRSLFGNDPSSQ

SEQ ID NO: 196 - protein, 503 aa, Human immunodeficiency virus
  misc_feature (91)..(91): Xaa can be any naturally occurring amino acid
  misc_feature (125)..(125): Xaa can be any naturally occurring amino acid
  misc_feature (127)..(127): Xaa can be any naturally occurring amino acid
  misc_feature (130)..(130): Xaa can be any naturally occurring amino acid
MGARASVLSGGKLDKWEKIRLRPGGKKKYQLKHIVWASRELERFAVNPGLLETSDGCRQILLQLQPSLQTGSEELKSLFNTVAVLYCVHQXIEVKDTKEALDKIEEEQNKSKKKAQAQQAAADTXNXSQXSQNYPIVQNLQGQMVHQPISPRTLNAWVKVVEEKAFSPEVIPMFTALSEGATPQDLNTMLNTVGGHQAAMQMLKETINEEAAEWDRLHPPQAGPIAPGQIREPRGSDIAGTTSTLQEQITWMTNNPPIPVGEIYKRWIILGLNKIVRMYSPTSILDIRQGPKEPFRDYVDRFYKTLRAEQASQDVKNWMTETLLVQNANPDCKTILKALGPGASLEEMMTACQGVGGPGHKARVLAEAMSQMTGAANSIMMQRGNFKNNRKTVKCFNCGKEGHIARNCRAPRKKGCWKCGKEGHQMKDCTERQANFLGKIWPSHKGRPGNFLQSRPEPSAPPEESFRFGEETTTPCQKQEPKDKELYPLASLKSLFGNDPSSQ

SEQ ID NO: 197 - protein, 506 aa, Human immunodeficiency virus
MGARASVLSGGQLDKWEKIRLRPGGKKKYKLKHLVWASRELERFAVNPGLLETSDGCRQILGQLQPALQTGSEELRSLYNTVATLYCVHQGIGVRDTKEAIEKVEEEQNKSKKKAQQAAAAADTGNSSQVSQNYPIVQNLQGQMVHQALSPRTLNAWVKVVEEKAFSPEVIPMFTALSEGATPQDLNTMLNTVGGHQAAMQMLKETINEEAAEWDRLHPVHAGPIAPGQMREPRGSDIAGTTSTLQEQIGWMTNNPPIPVGEIYKRWIILGLNKIVRMYSPTSILDIRQGPKEPFRDYVDRFYKTLRAEQASQDVKNWMTETLLIQNSNPDCKTILKALGQGATLEEMMTACQGVGGPGHKARVLAEAMSQVTTPPNAIMMQRGNFRNQRKTVKCFNCGKEGHIARNCRAPRKKGCWKCGREGHQMKDCTERQANFLGKIWPSHKGRPGNFLQNRPEPTAPTAPPEESFRFGEETTTHSQKQETIDKEMYPLASLKSLFGNDPSSQ

SEQ ID NO: 198 - protein, 504 aa, Human immunodeficiency virus
MGARASVLSGGELDRWEKIRLRPGGKKKYKLKHIVWASRELERFAVNPGLLETSEGCRQILGQLHPSLQTGSEELKSLYNTVATLYCVHQKIDVKDTKEALDKVEEEQNKSKKKAQPAAAAASAGSNSQVSQNYPIVQNLQGQMVHQAISPRTLNAWVKVVEEKAFSPEVIPMFSALSEGATPQDLNTMLNTVGGHQAAMQMLKETINEEAAEWDRLHPVHAGPIAPGQMREPRGSDIAGTTSTLQEQIGWMTNNPPIPVGEIYKRWIILGLNKIVRMYSPTSILDIRQGPKEPFRDYVDRFYKTLRAEQATQEVKNWMTETLLVQNANPDCKTILKALGPAATLEEMMTACQGVGGPGHKARVLAEAMSQATNSVNIMMQRGNFRSPKRIVKCFNCGKEGHIAKNCRAPRKKGCWKCGKEGHQMKDCTERQANFLGKIWPSHKGRPGNFLQSRPEPTAPPAESFKFGEETTTPSQKQEIIDRDKELYPLASLRSLFGSDPSSQ

SEQ ID NO: 199 - protein, 503 aa, Human immunodeficiency virus
  misc_feature (165)..(165): Xaa can be any naturally occurring amino acid
  misc_feature (232)..(232): Xaa can be any naturally occurring amino acid
  misc_feature (264)..(264): Xaa can be any naturally occurring amino acid
  misc_feature (310)..(310): Xaa can be any naturally occurring amino acid
  misc_feature (373)..(373): Xaa can be any naturally occurring amino acid
  misc_feature (479)..(479): Xaa can be any naturally occurring amino acid
  misc_feature (482)..(482): Xaa can be any naturally occurring amino acid
  misc_feature (486)..(486): Xaa can be any naturally occurring amino acid
  misc_feature (501)..(501): Xaa can be any naturally occurring amino acid
MGARASVLSGGELDRWEKIRLRPGGKKKYKLKHIVWASRELERFAVNPGLLETSAGCRQILGQLQPSLQTGSEELKSLYNTVATLYCVHQKIDVKDTKEALDKIEEEQNKSKKKAQQAAADTGNSSSQVSQNYPIVQNMQGQMVHQPLSPRTLNAWVKVVEEKNXSPEVIPMFTALSEGATPQDLNTMLNTIGGHQAAMQMLKETINEEAAEWDRLHPVHAGPIAPGQMREXRGSDIAGTTSTLQEQIGWMTNNPPIPVGEIYXRWIVLGLNKIVRMYSPTSILDIKQGPKEPFRDYVDRFYKTLRAEQXSQEVKGWMTETLLVQNANPDCKTILKAMGPATLEEMMTACQGVGGPGHKARVLAEAMSQVTSXANIMMQRSNFRNQRKIVKCFNCGKEGHIARNCKAPRKRGCWKCGQEGHQMKDCTERQANFLGKIWPSHKGRPGNFLQSRPEPTAPPAPPEESFRFGEGTTTPPQKXEQXDKEXYPLASLKSLFGNDPXSQ

SEQ ID NO: 200 - protein, 500 aa, Human immunodeficiency virus
  misc_feature (116)..(116): Xaa can be any naturally occurring amino acid
  misc_feature (298)..(298): Xaa can be any naturally occurring amino acid
  misc_feature (407)..(407): Xaa can be any naturally occurring amino acid
  misc_feature (477)..(477): Xaa can be any naturally occurring amino acid
MGARASVLSGGELDKWEKIRLRPGGRKKYRLKHIVWASRELERFAVNPGLLESAQGCRQILGQLQPSLQTGSEELRSLFNTVATLYCVHQRIDIKDTKEALEKIEEEQTKSKKKAXQAAADTGNSSQVSQNYPIVQNLQGQAVHQAISPRTLNAWVKVVEEKAFSPEVIPMFSALSEGATPQDLNTMLNTVGGHQAAMQMLKDTINEEAAEWDRLHPVHAGPIAPGQMREPRGSDIAGTTSTLQEQIDWMTHNPPIPVGEIYKRWIILGLNKIVRMYSPVSILDIKQGPKEPFRDYVXRFYKTLRAEQGSQDVKNWMTETLLVQNANPDCKTILRALGPGAQLEEMMTACQGVGGPGHKARVLAEAMSQVSNSATIMMQKGNFRNQRKIVKCFNCGKNGHIARNCRXPRKKGCWKCGKEGHQMKDCDERQANFLGKIWPSYKGRPGNFLQSRPEPTAPPAESFGFGEETATPSQKQXSIDKDLYPLTSLKSLFGNDPSSQ

SEQ ID NO: 201 - protein, 502 aa, Human immunodeficiency virus
  misc_feature (163)..(163): Xaa can be any naturally occurring amino acid
  misc_feature (448)..(448): Xaa can be any naturally occurring amino acid
MGARASVLSGGELDKWEKIRLRPGGKKRYKLKHIVWASRELERFAVNPGLLETSEGCRQILEQLQPALKTGSEELRSLFNTVAVLYCVHQRIEVKDTKEALDKIEEEQNKSKKKAQQAAADTGNSSTSTVSQNYPIVQNLQGQMVHQALSPRTLNAWVKVVEXKAFSPEVIPMFSALSEGATPQDLNTMLNTVGGHQAAMQMLKETINEEAAEWDRLHPVHAGPIAPGQMREPRGSDIAGTTSTLQEQIAWMTNNPPIPVGEIYKRWIILGLNKIVRMYSPTSILDIRQGPKEPFRDYVDRFYRTLRAEQASQEVKNWMTETLLVQNANPDCKTILKALGPGATLEEMMTACQGVGGPGHKARVLAEAMSQMTQPATIMMQRGNFRNQRKSVKCFNCGKEGHIARNCRAPRKKGCWKCGKEGHQMKDCTERQANFLGKIWPSHKGRPXNFPQGRLEPTAPPEEGFRMGEETTTPPQKQGSMNKELNPLVSLKSLFGNDPSSQ

SEQ ID NO: 202 - protein, 509 aa, Human immunodeficiency virus
MGARASVLSGGELDKWEKIRLRPGGKKKYKLKHIVWASRELERFAVNPGLLETSQGCRQILEQLQPSLQTGSEELRSLFNTVATLWCVHQKIEVKDTKEALDKLEEEQNKSKKKAQQAAAAQQAAAGTGNNSQVSQNYPIVQNLQGQMVHQALSPRTLNAWVKVIEEKAFSPEVIPMFSALSEGATPQDLNTMLNTVGGHQAAMQMLKETINEEAAEWDRLHPVHAGPIAPGQMREPRGSDIAGTTSTLQEQIGWMTHNPPIPVGEIYKRWIILGLNKIVRMYSPVSILDIKQGPKEPFRDYVDRFYKTLRAEQASQEVKNWMTETLLVQNANPDCKTILKALGPAATLEEMMTACQGVGGPGHKARVLAEAMSQVTNSATIMMQKGNFNYQRKPIKCFNCGKAGHIAKHCKAPRKKGCWKCGKEGHQMKDCNERQANFLGKIWPSHKGRPGNFLQNRPEPSAPPEEIFRFGEETTPSQKQETRDRDRDKELYPSASLKSLFGNDPLLQ

SEQ ID NO: 203 - protein, 503 aa, Human immunodeficiency virus
MGARASVLSGGKLDKWEGIRLRPGGNKKYKLKHIVWASRELERFAVNPGLLETSEGCRQILGQLQPSLQTGSEELKSLYNTIAVLYCVHQRIDVKDTKEALDKIEEEQNKSKKKAQPAAADTGNSSSSQVSQNYPIVQNLQGQMVHQALSPRTLNAWVKVIEEKAFSPEVIPMFSALSEGATPQDLNTMLNTVGGHQAAMQMLKETINEEAAEWDRLHPVHAGPIAPGQMREPRGSDIAGTTSNLQEQINWMTGNPPIPVGEIYKRWIILGLNKIVRMYSPVSILDIRQGPKEPFRDYVDRFYKTLRAEQASQEVKNWMTETLLVQNANPDCKTILKALGPAATLEEMMTACQGVGGPGHKARVLAEAMSQVNQTNIMMQRGNFRNQRKTIKCFNCGKEGHLARNCRAPRKKGCWKCGKEGHQMKDCTERQANFLGKIWPSHKGRPGNFLQSRPEPTAPPEESFRFGEETTTPSQKQEPRDRDKELYPLTSLRSLFGNDPSSQ

SEQ ID NO: 204 - protein, 499 aa, Human immunodeficiency virus
MGARASVLSGGKLDKWEKIRLRPGGKKQYKLKHIVWASRELERFAVNPGLLETAGGCKQILEQLQPSLQTGSEELKSLFNTVAVLYCVHKDIEIKDTKEALDKIEEEQNKSKKKAQQAAADTGSNSQVSQNYPIVQNHQGQMVHQAISPRTLNAWVKVVEEKAFSPEVIPMFSALSEGATPQDLNTMLNTVGGHQAAMQMLKETINEEAAEWDRMHPVQAGPIAPGQLREPRGSDIAGTTSTLQEQVAWMTHNPPIPVGEIYKRWIILGLNKIVRMYSPVSILDIRQGPKEPFRDYVDRFYKTLRAEQASQDVKNWMTETLLVQNANPDCKTILKALGPAATLEEMMTACQGVGGPGHKARVLAEAMSQVTTPGTIMMQKGNFRNQKKSVKCFNCGKEGHIARNCRAPRKKGCWKCGKEGHQMKDCIERQANFLGKIWPSHKGRPGNFLQSTPEPTAPPEESFRFVEEKNPSQKQEQIDKELYPSASLRSLFGNDPSSQ

SEQ ID NO: 205 - protein, 499 aa, Human immunodeficiency virus
MGARASVLSGGELDKWEKIRLRPGGRKQYKLKHIVWASRELERFAVNPGLLETSEGCRQIMGQLQPALQTGSEELRSLYNTVAVLYCVHQRIDVKDTKEALDKIEEEQNKCKKKAQQAAADTGNSNQVSQNYPIVQNIQGQMVHQAISPRTLNAWVKVIEEKAFSPEVIPMFSALSEGATPQDLNTMLNTVGGHQAAMQMLKDTINEEAAEWDRLHPVQAGPVAPGQMRDPRGSDIAGTTSTLQEQIGWMTNNPPIPVGEIYKRWIILGLNKIVRMYSPTSILDIRQGPKEPFRDYVDRFYKTLRAEQASQEVKNWMTETLLVQNSNPDCKSILKALGPAATLEEMMIACQGVGGPGHKARVLAEAMSQVTGSANIMMQRGNFRNQRKIVKCFNCGKEGHIARNCRAPRKKGCWKCGKEGHQMKDCTERQANFLGKIWPSHKGRPGNFLQSRPEPTAPPEESFRFGEETTPPQKQETTDKELYPLASLRSLFGNDPSSQ

SEQ ID NO: 206 - protein, 503 aa, Human immunodeficiency virus
MGARASVISGAELDRWEKIRLRPGGSKKYKLKHIVWASRELERFAVNPGLLETSEGCRQILVQLQPSLQTGSEELKSLYNTVVTLYCVHRRIDVKDTKEALEKVEEEQNKSKKNAQQVQQAAAGTGNSSQVSQNYPIVQNLQGQMVHQAISPRTLNAWVKVIEEKAFSPEVIPMFSALSEGATPQDLNTMLNTVGGHQAAMQMLKETINEEAAEWDRLHPVHAGPAAPGQMREPRGSDIAGSTSTLQEQIGWMTSNPPIPVGEIYKRWIILGLNKIVRMYSPTSILDIRQGPKEPFRDYVDRFYKTLRAEQASQEVKNWMTETLLVQNANPDCKTILKALGPAATLEEMMTACQGVGGPSHKARVLAEAMSQATQSNAIMMQRGNFKNQRKIVKCFNCGKEGHIARNCRAPRKKGCWKCGREGHQMKDCTERQANFLGKIWPSNKGRPGNFLQSRPEPTAPPAPPEESFRFGEEKTAPVQKQEPIDKELYPLASLKSLFGNDP

SEQ ID NO: 207 - protein, 502 aa, Human immunodeficiency virus
MGARASILSGGELDRWEKIRLRPGGKKQYKLKHIVWASRELERFAVNPSLLETSEGCRQILGQLQPSLQTGSEELKSLYNTVAVLYCVHQRIEVKDTKEALDKIEEEQNKSKKKAQQAAAATGTSSQVSQNYPIVQNMQGQMVHQAISPRTLNAWVKVVEEKAFSPEVIPMFSALSEGATPQDLNTMLNTVGGHQAAMQMLKETINEEAAEWDRLHPVHAGPVAPGQMREPRGSDIAGSTSTLQEQVGWMTSNPPIPVGEIYKRWIILGLNKIVRMYSPTSILDIRQGPKEPFRDYVDRFYKTLRAEQASQEVKNWMTETLLVQNANPDCKTILKALGPAATLEEMMTACQGVGGPGHKARVLAEAMSQVNPNAIMMQRGNFRNQKRTIKCFNCGKEGHLARNCRAPRKKGCWKCGKEGHQMKECTERQANFLGKIWPSSKGRPGNFLQNRPEPTAPPAPPEESFRFGEGTTTPPQKQEPKDKELYPVTSLRSLFGNDPSSQ

SEQ ID NO: 208 - protein, 501 aa, Human immunodeficiency virus
MGARASVLSGGALDRWEKIRLRPGGKKKYKLKHIVWASRELERFAVNPGLLETSEGCKQIIRQLQPSLQTGSEELKSLYNTIAVLYCVHQKIEIKDTKEALEKIEEEQNKCKKKAQQAAADTGNSSQVSQNYPIVQNMQGQMVHQAISPRTLNAWVKVIKEKAFSPEIIPMFSALSEGATPQDLNTMLNTVGGHQAAMQMLKETINEEAADWDRVHPVHAGPIAPGQMREPRGSDIAGTTSTLQEQIGWMTNNPPIPVGEIYKRWIILGLNKIVRMYSPVSILDIRQGPKEPFRDYVDRFYKTLRAEQASQEVKNWMTETLLVQNANPDCKTILKALGPGATLEEMMTACQGVGGPGHKARVLAEAMSQIATPPAIMMQRGNFKNQRKVVKCFNCGKEGHIAKHCRAPRKRGCWKCGKEGHQMKDCTERQANFLGKIWPSSKGRPGNFLQSRPEPSAPPEESFRFGEETATPPQKQEPPVDKELYPLASLRSLFGNDPSSQ

SEQ ID NO: 209 - protein, 500 aa, Human immunodeficiency virus
MGARASVLSGGKLDRWEKIRLRPLGRKKYRLKHIVWASRELERFAVNPGLLETAEGCRQILGQLHPSLQTGSEELRSLYNTIVVLYCVHQGIEVKDTKEALEKVEEEQNKSKEKAQQAAADTRNKSQVSQNYPIVQNIQGQMVHQAISPRTLNAWVKVVEEKAFSPEVIPMFSALSEGATPQDLNTMLNTVGGHQAAMQMLKETINEEAAEWDRLHPVHAGPIAPGQMREPRGSDIAGTTSTLQEQIAWMTNNPPIPVGDIYKRWIIMGLNKIVRMYSPVSILDIRQGPKEPFRDYVDRFYKTLRAEQASQDVKNWMTETLLVQNANPDCKTILKALGPAATLEEMMTACQGVGGPGHKARVLAEAMSQVTNPTNIMMQKGNFRNQRKTVKCFNCGKEGHIARNCRAPRKKGCWKCGKEGHQMKECTERQANFLGKIWPSHKGRPGNFLQSRPEPTAPPAESFRFGEETATPPQKQEPIDKEMYPLASLKSLFGNDPSSQ

SEQ ID NO: 210 - protein, 500 aa, Human immunodeficiency virus
MGARASVLSGGELDRWERIRLRPGGKKTYKLKHIVWASRELERFAVNPGLLETSDGCKQILAQLQPALQTGSEELKSLYNAVAVLYCVHRKIDVRDTKEALDKIEEEQNKSKKKVQQAAADTGNSSQVSQNYPIVRNLQGQMVHQPITPRTLNAWVKVVEEKAFSPEVIPMFSALSEGATPQDLNTMLNTVGGHQAAMQMLKETINEEAAEWDRMHPVHAGPIAPGQMREPRGSDIAGTTSTLQEQIDWMTHNPPIPVGEIYKRWIILGLNKIVRMYSPTSILDIRQGPKEPFRDYVDRFYKTLRAEQASQEVKNWMTETLLVQNANPDCKTILKALGPAATLEEMMTACQGVGGPGHKARVLAEAMSQVTNQGTIMMQRGNFRNQRKIIKCFNCGKEGHIAKHCKAPRKKGCWKCGREGHQMKDCTERQANFLGKIWPSSKGRPGNFLQNRPEPTAPPEESFGFGEETTTPSQKQGTIDKELYPLASLRSLFGNDPSSQ

SEQ ID NO: 211 - protein, 501 aa, Human immunodeficiency virus
MGARASVLSGGELDRWERIRLRPGGKKKYKLKHIVWASRELERFAVNPGLLETTEGCRQILGQLQPSLQTGSEELKSLYNTVAVLYCVHQRIEIKDTKEALEKIEEEQNKSKKKAQQAAAAADTGSNSKVSQNYPVVQNMQGQMVHQPISPRTLNAWVKVIEEKAFSPEIIPMFSALSEGATPQDLNTMLNTVGGHQAAMQMLKDTINEEAADWDRLHPVQAGPVAPGQMREPRGSDIAGTTSTLQEQIAWMTNNPPIPVGEIYKRWIILGLNKIVRMYSPVSILDIRQGPKEPFRDYVDRFYRTLRAEQASQDVKNWMTETLLVQNSNPDCKTILKALGPGATLEEMMTACQGVGGPGHKARVLAEAMSQIATPPTVMMQRGNFRNQRKVVKCFNCGKEGHIAKNCRAPRKRGCWKCGKEGHQMKDCTERQANFLGKIWPSSKGRPGNFPQSRLEPTAPPEESLREETITPPQRQEPPVDKEMYPWASLKSLFGNDPSSQ

SEQ ID NO: 212 - protein, 501 aa, Human immunodeficiency virus
MGARASVLSGGKLDSWEKIRLRPGGKKKYKLKHIVWASREVERLAVNPGLLETPEGCRQILGQLQPSLQTGSEELKSLYNAVAVLYCVHQRIEVKDTKEALDKIEEEQNKSKKKAQQAAAADTGNSNQVSQNYPIVQNLQGQMVHQAISPRTLNAWVKVVEEKAFSPEVIPMFSALSEGATPQDLNTMLNTVGGHQAAMQMLKETINEEAAEWDRVHPVHAGPIAPGQMREPRGSDIAGTTSTLQEQVGWMTSNPPIPVGEIYKRWIILGLNKIVRMYSPTSILDIRQGPKEPFRDYVDRFYKTLRAEQASQEVKNWMTETLLVQNANPDCKTILKALGPAATLEEMMTACQGVGGPGHKARVLAEAMSQVTNQTAVMMQRGKFTNQRKPIKCFNCGKEGHLARNCRAPRKKGCWKCGKEGHQMKECSERQANFLGKIWPSHKGRPGNFLQSRPEPSAPPMESFRFGEETATPSQKQEQTDKELYPLASLRSLFGNDPSSQ

SEQ ID NO: 213 - protein, 504 aa, Human immunodeficiency virus
MGARASVISGGELDRWEKIRLRPGGSKKYKLKHIVWASRELERYAINPGLLETGAGCKQILEQLQPALQTGSEELKSLFNAIAVLFCVHQRIDVKDTKEALDKIEEEQNKSKKRIQQAQQAAAADTGNSSQVSQNYPIVQNLQGQMVHQPISPRTLNAWVKVVEEKAFSPEVIPMFSALAEGATPQDLNTMLNTVGGHQAAMQMLKETINEEAAEWDRLHPVHAGPIAPGQMREPRGSDIAGTTSTLQEQIGWMTHNPPIPVGEIYKRWIILGLNKIVRMYSPTSILDIRQGPKESFRDYVDRFYKTLRAEQASQEVKNWMTETLLVQNANPDCKTILKALGPAATLEEMMTACQGVGGPGHKARVLAEAMSQVTNSATIMMQKGNFRNQRKVVKCFNCGKEGHIARNCRAPRKKGCWKCGKEGHQMKDCSERQANFLGKIWPSHKGRPGNFLQSRLEPTAPPEESFRFGEEKAPPPQKQEAVDKELYPLTSLRSLFGNDPSSQ

SEQ ID NO: 214 - protein, 508 aa, Human immunodeficiency virus
MGARASVLSGGKLDKWEKIQLRPGGKKKYKLKHIVWASRELERFAVNPGLLETSGGCKQILAQLQPSLKTGSEELKSLYNTVAVLYCVHQRIEIQDTKEALDRIEEEQNKSEKKAQQAAAAAADTGNSRQVSQNYPIVQNLQGQMVHQAISPRTLNAWVKVIEEKAFSPEVIPMFSALSEGATPQDLNTMLNTVGGHQAAMQMLKETINEEAAEWDRLHPVHAGPIAPGQMREPRGSDIAGTTSTLQEQIGWMTNNPPIPVGEIYKRWIILGLNKIVRMYSPVSILDIRQGPKEPFRDYVDRFYKTLRAEQASQEVKNWMTETLLVQNANPDCKTILKALGPAATLEEMMTACQGVGGPGHKARVLAEAMSQVNSATVMMQKGNFRNQRKTVKCFNCGKEGHIARNCRAPRKKGCWKCGKEGHQMKDCMERQANFLGKIWPSHKGRPGNFLQSKPEPTAPLEPTAPPEESFRFGEERTTPSQKQEPIDKGLYPLASLRSLFGNDPLSQ

SEQ ID NO: 215 - protein, 501 aa, Human immunodeficiency virus
MGARASVLSGGKLDQWEKIRLRPGGKKSYKLKHLVWASRELERFAVNPGLLETSEGCRQILGQLHPSLQTGSEELQSLYNTIAVLYCVHQRIEVKDTKEALEKIEEEQNKSKKKAQQAAADTGKNNSQVSQNYPIVQNLQGQMVHQAISPRTLNAWVKVVEEKAFSPEVIPMFSALSEGATPQDLNTMLNTVGGHQAAMQMLKETINEEAAEWDRLHPVHAGPIAPGQMREPRGSDIAGTTSTLQEQIGWMTNNPPIPVGEIYKRWIILGLNKIVRMYSPTSILDIKQGPKEPFRDYVDRFYKTLRAEQGSQEVKTWMTETLLVQNANPDCKTILKALGPGATLEEMMTACQGVGGPGHKARVLAEAMSQVTNSATIMMQRGNFKNQRKIVKCFNCGREGHIARNCRAPRKRGCWKCGKEGHQMKECTERQANFLGKIWPSHKGRPGNFLQSRPEPTAPPEESFRFGEETATPPQKQEPIDKEMYPLASLRSLFGNDPSSQ

SEQ ID NO: 216 - protein, 500 aa, Human immunodeficiency virus
MGARASVLSGGELDRWEKIRLRPGGKKKYRLKHIVWASRELERFAVNPGLLETSEGCRQILEQLQPALNTGSEELRSLYNTVATLYCVHQKIEVKDTKEALDKIEEEQNKSKKKAQQAAADKGNSSQVSQNYPIVQNLQGQMVHQAISPRTLNAWVKVVEEKAFSPEVIPMFSALSEGATPQDLNTMLNTVGGHQAAMQMLKETINEEAAEWDRLHPVHAGPIAPGQMREPRGSDIAGTTSTLQEQIGWMTNNPPIPVGEIYKRWIILGLNKIVRMYSPTSILDIRQGPKEPFRDYVDRFYKTLRAEQASQDVKNWMTETLLVQNANPDCKTILKALGPAATLEEMMTACQGVGGPGHKARVLAEAMSQVTNPTNIMMQRGNFKNQRKSVKCFNCGKEGHIARNCRAPRKKGCWKCGREGHQMKDCTERQANFLGKIWPSHKGRPGNFLQSRPEPTAPPEESFRFGEGTTIPSQKQEQIDKEMYPLTSLKSLFGNDPSSQ

SEQ ID NO: 217 - protein, 500 aa, Human immunodeficiency virus
MGARASVLSGGELDKWEKIRLRPGGKKTYKLKHIVWASRELERFAVNPGLLETSGGCRQILKQLQPSLQTGSEELKSLYNTVATLYCVHQKIEIKDTKEALDKIEEEQNKSKKREQQVAADTGNSSQVSQNYPIVQNLQGQMVHQSISPRTLNAWVKVVEEKAFSPEVIPMFSALSEGATPQDLNTMLNTVGGHQAAMQMLKETINDEAAEWDRLHPVHAGPAAPGQMREPRGSDIAGTTSTLQEQIGWMTSNPPIPVGEIYKRWIILGLNKIVRMYSPTSILDIKQGPKEPFRDYVDRFYKTLRAEQASQEVKGWMTETLLVQNANPDCKTILKALGPGATLEEMMTACQGVGGPGHKARVLAEAMSQVTNSATIMMQRGNFRNQRKTVKCFNCGKEGHIARNCRAPRKRGCWKCGKEGHQMKDCTERQANFLGKIWPSHKGRPGNFLQSRPEPTAPPEESVRFGEETTTPSQKQGTIDKDLYPLTSLRSLFGNDPSSQ

SEQ ID NO: 218 - protein, 508 aa, Human immunodeficiency virus
MGARASVLSGGELDRWEKIRLRPGGKKRYKLKHIVWASRELERFAVNPGLLETSEGCKQILRQLQPSLQTGSEELKSLYNTVATLYCVHQRIEVKDTKEALDKIEEEQNKCKKKAQQAAADTGSSSQVSQQVSQNYPIVQNLQGQMVHQAISPRTLNAWVKVVEEKAFSPEVIPMFSALSEGATPGDLNTMLNTIGGHQAAMQMLKETINEEAAEWDRLHPVHAGPVAPGQMREPRGSDIAGTTSTLQEQIGWMTSNPPIPVGEIYKRWIILGLNKIVRMYSPTSILDIRQGPKEPFRDYVDRFYKTLRAEQASQEVKNWMTETLLVQNANPDCKTILKALGPAATLEEMMTACQGVGGPGHKARVLAEAMSQVTTPPAIMMQRGNFRNQRKVVKCFNCGKEGHVAKNCRAPRKKGCWKCGREGHQMKDCTERQANFLGKIWPSYKGRPGNFLQNRTENRIEPTAPPEESFRFGEETATPPQKQEPIDKETYPLTSLRSLFGNDPLSQ

SEQ ID NO: 219 - protein, 501 aa, Human immunodeficiency virus
MGARASVLSGGELDRWEKIRLRPGGKKQYRLKHVVWASRELERFAINPGLLETSEGCRQILGHLQSSLQTGSEELRSLFNTVATLYCVHQKIDVRDTKEALEKVEEEQNKSKKKAQQAAADTGDSSKQVSQNYPIVQNLQGQMVHQAISPRTLNAWVKVVEEKAFSPEVIPMFTALSEGATPQDLNTMLNTVGGHQAAMQMLKETINEEAAEWDRLHPVHAGPPAPGQLREPRGSDIAGTTSTLQEQIGWMTTNPPIPVGEIYKRWIILGLNKIVRMYSPVSILDIRQGPKEPFRDYVDRFYKTLRAEQASQDVKNWMTETLLIQNANPDCRTILKALGPAPTLEEMMSACQGVGGPGHKARVLAEAMSHMTNANTIMMQRGNFRNQRKIVKCFNCGKEGHIAKNCRAPRKKGCWKCGKEGHQMKECTERQANFLGKIWPSHKGRPGNFLQSRPEPTAPPEESFRFGEETTTPSQKQEPRDRELYPLTSLKSLFGNDPSSQ

SEQ ID NO: 220 - protein, 504 aa, Human immunodeficiency virus
  misc_feature (190)..(190): Xaa can be any naturally occurring amino acid
MGARASVLSGGELDKWEKIRLRPGGKKQYKLKHIVWASRELERFAVNPGLLETSEGCRQILGQLQPSLQTGSEELRSLYNTIAVLYCVHQKIDIKDTKEALDKIEEEQNKSKKKAQQAAADAGNSSQVSQNYPIVQNIQGQMVHQAISPRTLNAWVKVVEEKAFSPEVIPMFSALSEGATPQDLNTMLNXVGGHQAAMQMLKETINEEAAEWDRLHPVHAGPVAPGQMREPRGSDIAGTTSTLQEQIGWMTNNPPIPVGEIYKRWIILGLNKIVRMYSPTSILDIKQGPKEPFRDYVDRFYKTLRAEQASQEVKNWMTETLLVQNANPDCKTILKALGPAATLEEMMTACQGVGGPGHKARVLAEAMSQVTTASAAIMMQRGNFKNQRKIIKCFNCGREGHIAKNCRAPRKRGCWKCGKEGHQMKDCTERQANFLGKIWPSHKGRPGNFLQSRPEPSAPPAPPEESFRFGEETTTPCQKQEPIDKELYPLASLKSLFGNDPSSQ

SEQ ID NO: 221 - protein, 499 aa, Human immunodeficiency virus
MGARASVLSGGKLDKWEKIRLRPGGKKRYKLKHLVWASRELERFAVNPGLLETAEGCRQIIGQLQPSLQTGSEELKSLFNTVATLYCVHQGIEVKDTKEALDKIEEEQNKSKTKVQQAAAAANSSQVSQNYPIVQNLQGQMVHQAISPRTLNAWVKVVEEKAFSPEVIPMFAALSEGATPQDLNTMLNTVGGHQAAMQMLKETINEEAAEWDRLHPVHAGPIAPGQMREPRGSDIAGTTSNLQEQIAWMTNNPPIPVGEIYKKWIIMGLNKIVRMYSPTSILDIKQGPKEPFRDYVDRFYKTLRAEQATQEVKNWMTETLLVQNANPDCKTILKALGPAATLEEMMTACQGVGGPGHKARVLAEAMSQVTNSATIMMQKGNIRNQRKTVKCFNCGKEGHIARNCRAPRKKGCWKCGREGHQMKDCTERQANFLGKIWPSHKGRPGNFLQSRPEPTAPPEESFRFGEETTTPPQKQEPIDKELYPLASLKSLFGNDPSSQ

SEQ ID NO: 222 - protein, 500 aa, Human immunodeficiency virus
  misc_feature (64)..(64): Xaa can be any naturally occurring amino acid
  misc_feature (219)..(219): Xaa can be any naturally occurring amino acid
  misc_feature (391)..(391): Xaa can be any naturally occurring amino acid
MGARASVLSGGELDKWEKIRLRPGGKKQYKLKHIVWASRELERFAVNPGLLETSGGCRQILGQXQPSLQTGSEELKSLYNTVAVLYCVHQRIDVRDTKEALEKIEEEQNKSKKKAQQAAADTGNSSQVSQNYPIVQNIQGQMVHQALSPRTLNAWVKVVEEKAFSPEVIPMFSALSEGATPQDLNTMLNTVGGHQAAMQMLKETINEEAAEWDRLHPVXAGPIAPGQIREPRGSDIAGTTSNLQEQIAWMTNNPPIPVGEIYKRWIIMGLNKIVRMYSPTSILDIRQGPKEPFRDYVDRFYKTLRAEQASQEVKNWMTETLLVQNANPDCKTILKALGPAATLEEMMTACQGVGGPGHKARVLAEAMSQMTNSTNIMMQRGNIRNQKRTVXCFNCGKEGHIARNCRAPRKKGCWKCGKEGHQMKDCTERQANFLGKIWPSHKGRPGNFLQSRPEPTAPPAESFSFGEETTTPPQKQEPIDKEKYPLASLRSLFGNDPSSQ

SEQ ID NO: 223 - protein, 506 aa, Human immunodeficiency virus
MGARASILSGGELDRWEKIRLRPGGKKKYELKHIVWASRELERFAVNPGLLETADGCRQILGQLQSSLQTGSEDLKSVYNTVAVLYCVHQRIEIKDTKEALERIEEEQNKSKKRAQQAAAATGNSSQVSQNYPIVQNMQGQMVHQAISPRTLNAWVKVIEEKAFSPEVIPMFSALSEGATPQDLNTMLNTVGGHQAAMQMLKETINEEAAEWDRLHPVHAGPIAPGQMREPRGSDIAGTTSTLQEQIGWMTNNPPIPVGEIYKRWIILGLNKIVRMYSPISILDIRQGPKEPFRDYVDRFYKTLRAEQASQEVKNWMTETLLVQNANPDCKTILKALGPAATLEEMMTACQGVGGPSHKARVLAEAMGQVTNSATIMMQRGNFRNQRRTVKCFNCGKEGHIAKNCRAPRKRGCWKCGKEGHQMKDCTERQANFLGKIWPSHKGRPGNFLQSRPEPTAPTDPTAPPEESFRFGEETTTPSQKQEQTDKELYPLASLRSLFGNDPSSQ

SEQ ID NO: 224 - protein, 503 aa, Human immunodeficiency virus
  misc_feature (23)..(23): Xaa can be any naturally occurring amino acid
  misc_feature (61)..(61): Xaa can be any naturally occurring amino acid
  misc_feature (188)..(188): Xaa can be any naturally occurring amino acid
  misc_feature (281)..(281): Xaa can be any naturally occurring amino acid
  misc_feature (363)..(363): Xaa can be any naturally occurring amino acid
  misc_feature (370)..(370): Xaa can be any naturally occurring amino acid
MGARASVLSGGELDKWEKIRLRXGGKKQYRLKHIVWASRELERFAVNPGLLETAAGCRQIXGQLQPSLQTGSEELKSLYNTVATLYCVHQKIQVSDTKEALDRIEEEQNKIKKKAQQEAADTGNSSQVSQNYPIVQNLQGQMVHQPMSARTLNAWVKVIEEKAFSPEVIPMFSALSEGATPQDLNTMXNTVGGHQAAMQILKETINEEAAEWDRLHPVHAGPIAPGQMREPRGSDIAGTTSNLQEQIGWMTHNPPIPVGDIYKRWIILGLNKIVRMYSPVXILDIRQGPKEPFRDYVDRFYKTLRAEQASQDVKNWMTETLLVQNANPDCKTILKALGPAATLEEMMTACQGVGGPGHKARVXAEAMSQXTNSATVMMQRGNFRNQRKTIKCFNCGKEGHIARNCRAPRKKGCWRCGKEGHQMKDCTGAQANFLGKIWPSHKGRPGNFLQNRPEPTAPPAPPEESFRFGEGTTTPSQKQEPIDKELYPLASLRSLFGNDPSSQ

SEQ ID NO: 225 - protein, 501 aa, Human immunodeficiency virus
  misc_feature (472)..(472): Xaa can be any naturally occurring amino acid
MGARASVLSGGKLDQWEKIRLRPGGKKKYKLKHIVWASRELERFAVNPGLLETSEGCRQILGQLQPSLQTGSEELKSLYNTVAVLYCVHQRIDVKDTKEALDKIEEEQNKSKKKAQQAAADTGSSSPASQNYPIVQNLQGQMVHQAISPRTLNAWVKVIEEKAFSPEVIPMFSALSEGATPQDLNTMLNTVGGHQAAMQMLKETINEEAAEWDRLHPVHAGPVAPGQMREPRGSDIAGTTSTLQEQIGWMTNNPPIPVGEIYKRWIILGLNKIVRMYSPISILDIRQGPKEPFRDYVDRFYKTLRAEQASQEVKNWMTETLLVQNANPDCKTILKALGPAATLEEMMTACQGVGGPSHKARILAEAMSQVTNSAANIMMQKGNFRNQRKTVKCFNCGKEGHMARNCRAPRKKGCWKCGKEGHQMKDCNERQANFLGKIWPSHKGRPGNFLQSRPEPTAPPAESFRFGEETTXPAPKQEPIDKELYPLASLKSLFGNDPSSQ

SEQ ID NO: 226 - protein, 507 aa, Human immunodeficiency virus
MGARASILSGGELDRWEKIRLRPGGKKKYRLKHIVWASRELERFAVNPGLLETSEGCKQILIQLQPSLKTGSEELKSLYNTIATLYCVHQRIDVKDTKDALDKIEEEQNKSKKKTQQAAADAGNSNTGNSSQVSQNYPIVQNVQGQMVHQAISPRTLNAWVKVIEEKAFSPEVIPMFTALSEGATPQDLNTMLNTVGGHQAAMQILKETINDEAAEWDRTHPVHAGPVAPGQMREPRGSDIAGTTSTLQEQIGWMTHNPPIPVGDIYKRWIILGLNKIVRMYSPTSILDIRQGPKEPFRDYVDRFYKTLRAEQASQDVKNWMTETLLVQNANPDCKTILKALGPGATLEEMMTACQGVGGPAHKARVLAEAMSQVTNSTSAHIMMQKGNFRNQRKNVKCFNCGKEGHIARNCRAPRRKGCWKCGKEGHQMKDCTERQANFLGKIWPSHKGRPGNFPQSRLEPTAPPEESIRFGEETTAPPQKQETTDKELYPLASLRSLFGSDPSLQ

SEQ ID NO: 227 - protein, 494 aa, Human immunodeficiency virus
MGARASVLSGEKLDKWERIRLRPGGKKQYRLKHLVWASRELERFAVNPGLLETSDGCKQILAQLQPSLPTGSEELKSLFNAIAVLYCVHRGIEVRDTKEALDKIEEEQNKSKKQAQQAAADNSQVSQNFPIVQNIQGQMVHQAISPRTLNAWVKVVEEKAFSPEVIPMFSALSEGATPQDLNTMLNTVGGHQAAMQMLKETINEEAAEWDRVHPVHAGPVAPGQMREPRGSDIAGTTSTLQEQIGWMTNNPPIPVGEIYKRWIILGLNKIVRMYSPTSILDIRQGPKEPFRDYVDRFYKTLRAEQASQEVKNWMTETLLVQNSNPDCKTILKALGPGATLEEMMTACQGVGGPGHKARILAEAMSQVTNSATIMMQRGNFRGQRKIVKCFNCGKEGHIAKNCKAPRRRGCWKCGKEGHQMKDCTERQANFLGKIWPSHKGRPGNFLQSRPEPSAPPEESFRFGEETTTPPQKQEPKDKEMYPLTSLRSLFGNDP

SEQ ID NO: 228 - protein, 500 aa, Human immunodeficiency virus
MGARASVLSGGKLDRWEKIRLRPGGRKKYRLKHIVWASNELERFALNPGLLETSEGCRQILGQLQPSLQTGSEEIKSLYNTVATLYCVHQNIDVKDTKEALDKIEEEQNKSKKKAQQAAAGTGNNSQVSQNYPIVQNLQGQMVHQAISPRTLNAWVKVVEEKAFSPEVIPMFTALSEGATPQDLNTMLNTVGGHQAAMQMLKETINEEAAEWDRLHPVQAGPIAPGQIREPRGSDIAGTTSNLQEQIAWMTNNPPIPVGEIYKRWIILGLNKIVRMYSPTSILDIKQGPKEPFRDYVDRFYKTLRAEQASQEVKNWMTETLLVQNANPDCKTILKALGPAATLEEMMTACQGVGGPGHKARVLAEAMSQVTNSNSIMMQRGNFRNPRKAVKCFNCGKEGHIAKNCRAPRKKGCWKCGKEGHQMKDCTERQANFLGKIWPSHKGRPGNFLQSRPEPTAPPEESFRFGEETTTPPQKQEPIDKELYPLASLKSLFGNDPSSQ

SEQ ID NO: 229 - protein, 501 aa, Human immunodeficiency virus
MGARASILSGGELDRWEKIRLRPGGKKKYRLKHIVWASRELERFAVNPGLLETADGCRQILGQLQPALQTGSEELRSLYNTVATLYCVHQRIEVKDTKEALDKIEEEQNKSKKKAQPAAAADTGNSSQVSQNYPIVQNLQGQMVHQPISPRTLNAWVKVVEEKAFSPEVIPMFTALSEGATPQDLNTMLNTVGGHQAAMQMLKETINEEAAEWDRMHPVHAGPIAPGQMREPRGSDIAGTTSTLQEQIGWMTSNPAIPVGEIYKRWIILGLNKIVRMYSPTSILDIRQGPKEPFRDYVDRFYKTLRAEQASQDVKNWMTETLLVQNANPDCKTILKALGPAATLEEMMTACQGVGGPGHKARVLAEAMSQVTNQTTIMMQRGNFRNQRKIVKCFNCGKEGHIARNCRAPRKKGCWKCGEEGHQMKDCTERQANFLGKIWPSHKGRPGNFLQSRPEPTAPPEESFRFGEETATPTQKQEPIDKEMYPLASLRSLFGNDPLSQ

SEQ ID NO: 230 - protein, 500 aa, Human immunodeficiency virus
MGARASVLSGGKLDKWERIRLRPGGKKKYKLKHLVWASRELERFAVNPGLLETAEGCRQILGQLQPSLQTGSEELKSLFNAVATLYCVHQNIEVKDTKEALDKIEEEQNKSKKKTQQAAADTGNSSQVSQNYPIVQNLQGQMVHQAISPRTLNAWVKVVEEKAFSPEVIPMFSALSEGATPQDLNTMLNTVGGHQAAMQMLKETINEEAAEWDRLHPVHAGPIAPGQMREPRGSDIAGTTSTLQEQIGWMTNNPPIPVGEIYKRWIILGLNKIVRMYSPTSILDIKQGPKEPFRDYVDRFYKTLRAEQASQEVKNWMTETLLVQNANPDCKTILKALGPAATLEEMMTACQGVGGPGHKARVLAEAMSQVTNPAAVMMQRGNFKNQRKTVKCFNCGKEGHIARNCRAPRKRGCWKCGKEGHQMKDCTERQANFLGKIWPSHKGRPGNFLQSRPEPSAPPEESFRFGEEAAAPPQKQEPTDKELYPFSSLKSLFGNDPSSQ

SEQ ID NO: 231 - protein, 502 aa, Human immunodeficiency virus
  misc_feature (372)..(372): Xaa can be any naturally occurring amino acid
MGARASVLSGGELDKWEKIYLRPGGKKKYKLKHIVWASRELERFAVNPGLLETSGGCRQILGQLQPSLQTGSEELRSLYNTVATLYCVHQKIEIRDTKEALEKIEEEQNKSKKKAQQAAAAADTGNSSQVSQNYPIVQNLQGQMVHQALSPRTLNAWVKVVEEKAFSPEVIPMFSALSEGATPQDLNTMLNTVGGHQAAMQMLKETINEEAAEWDRLHPVHAGPIAPGQMREPRGSDIAGTTSTLQEQIGWMTNNPPIPVGEIYKRWIILGLNKIVRMYSPVSILDIRQGPKEPFRDYVDRFYKTLRAEQASQDVKNWMTETLLVQNANPDCKTILKALGPAATLEEMMTACQGVGGPGHKARVLAEAMNQXTNSNTIMMQRGNFRNQGKNIKCFNCGKVGHIAKNCRAPRKRGCWKCGKEGHQMKDCTERQANFLGKIWPSHKGRPGNFLQSRPEPTAPPEESFRFGEGTAPPAPKQEQIDKELYPLASLKSLFGNDPSSQ

SEQ ID NO: 232 - protein, 500 aa, Human immunodeficiency virus
MGARASVLSGGKLDKWERIRLRPGGKKKYKLKHIVWASRELERFAVNPGLLETSEGCRQILGQLQPSLQTGSEELKSLFNTIATLYCVHQGIEIRDTKEALERIEEEQNKSKKKAQAAAADTESSRQVSQNYPIVQNLQGQMVHQPVSPRTLNAWVKVVEEKAFSPEVIPMFAALSEGATPQDLNTMLNTVGGHQAAMQMLKETINEEAAEWDRLHPVHAGPIAPGQMREPRGSDIAGTTSNLQEQIAWMTSNPPVPVGEIYKKWIILGLNKIVRMYSPTSILDIKQGPKEPFRDYVDRFYKTLRAEQASQEVKNWMTETLLVQNANPDCKTILKALGPAATLEEMMTACQGVGGPSHKAKVLAEAMSQVTNSTAVMMQKGNFRSQRKIVKCFNCGKEGHIAKNCRAPRRKGCWKCGKEGHQMKDCSERQANFLGKIWPSHKGRPGNFLQNRPEPTAPPEESFRFGEETTAPPQKQEPIDKELYPLASLKSLFGNDPSSQ

SEQ ID NO: 233 - protein, 501 aa, Human immunodeficiency virus
MGARASVLSGGKLDKWEKIRLRPGGKKRYKLKHIVWASRELERFAVNPGLLETAEGCRQILGQLQPSLQTGSEELKSLYNTVATLYCVHQYIEVKDTKEALDKIEEEQNKSKKRAQPAAAADTGNNSNVSQNYPIVQNSQGQMVHQAISPRTLNAWVKVIEEKAFSPEVIPMFTALSEGATPHDLNTMLNTVGGHQAAMQMLKETINDEAAEWDRLHPVHAGPIAPGQMREPRGSDIAGTTSTLQEQIAWTTNNPPIPVGEIYKRWIILGLNKIVRMYSPTSILDIKQGPKEPFRDYVDRFYKTLRAEQATQEVKNWMTETLLVQNANPDCKTILRALGPAATLEEMMTACQGVGGPGHKARVLAEAMSQVTNANAIMIQRGNFKGQRKTVKCFNCGKEGHIARNCRAPRKKGCWKCGQEGHQMKDCNERQANFLGKIWPSHKGRPGNFLQSRPEPTAPPEKSLRFGEGTTPPSQKQEPIDKEMYPLASLRSLFGNDPSSQ

SEQ ID NO: 234 - protein, 512 aa, Human immunodeficiency virus
MGARASVLSGGKLDKWEKIRLRPGGKKKYRLKHLVWASRELERFAVNPGLLETAEGCRQILGQLQPALQTGSEELKSLFNAIAVLYCVHQNIEIKDTKEALDKIEEEQNKCKKKTQQAAADTGNSGNTGNSSHVSQNYPIVQNLQGQMVHQAISPRTLNAWVKVVEEKAFSPEVIPMFSALSEGATPQDLNTMLNTVGGHQAAMQMLKETINEEAAEWDRLHPVHAGPVAPGQMREPRGSDIAGTTSTLQEQIGWMTNNPPIPVGEIYKRWIILGLNKIVRMYSPTSILDIKQGPKESFRDYVDRFYKTLRAEQATQEVKNWMTETLLVQNANPDCKTILKALGPAATLEEMMTACQGVGGPGHKARVLAEAMSQVTNSTAIMMQKGNFKNQRKTIKCFNCGKEGHLARNCRAPRKKGCWKCGKEGHQMKDCTERQANFLGKIWPSHKGRPGNFLQSRPEPTAPPEPTAPPEESFRFGEETATPPQGQRQTDKDLYPLTSLRSLFGNDPSSQ

SEQ ID NO: 235 - protein, 499 aa, Human immunodeficiency virus
MGARASVLSGGELDRWEKIRLRPGGKKKYRLKHIVWASRELERFAVNPGLLETSEGCRQILGQLQPALQTGSEELKSLFNTIAVLYCVHQRVEVKDTKEALDKIEEEQNKVKKKTQQAAADTESKSPVSQNYPIVQNLQGQMVHQPISPRTLNAWVKVVEEKAFSPEVIPMFSALAEGATPQDLNTMLNTVGGHQAAMQMLKETINEEAAEWDRLHPVHAGPIAPGQMREPRGSDIAGTTSTLQEQIAWMTNNPPIPVGEIYKRWIILGLNKIVRMYSPTSILDIKQGPKEPFRDYVDRFYRTLRAEQASQEVKNWMTETLLVQNSNPDCKTILKALGPAATLEEMMTACQGVGGPSHKARVLAEAMGQVTNSATIMMQRGNFRNKKIVKCFNCGREGHIARNCKAPRKRGCWKCGKEGHQMKDCTERQANFLGKIWPSHKGRPGNFLQSRPEPTAPPEESFRFGEETTTPSQKQETVDKEHYPLTSLRSLFGNDPSSQ

SEQ ID NO: 236 - protein, 502 aa, Human immunodeficiency virus
MGAGASILSGGELDRWERIRLRPGGKKKYRLKHVVWASRELERFAVNPGLLETSEGCRQILGQLQPALQTGSEELKSLYNTVATLYCVHQRIDVKDTKEALEKIEEEQNKFKKKAQQAAAGAGTGTSSQVSQNYPIVQNLQGQMVHQAISPRTLNAWVKVIEEKAFSPEVIPMFSALSEGATPQDLNTMLNTVGGHQAAMQMLKETINEEAAEWDRLHPVHAGPIAPGQMREPRGSDIAGTTSTLQEQIGWMTNNPPIPVGEIYKRWIILGLNKIVRMYSPVSILDIRQGPKEPFRDYVDRFYKTLRAEQASQEVKNWMTETLLVQNANPDCKTILKALGPAATLEEMMTACQGVGGPGHKARVLAEAMSHVTNANTIMMQRGNFKNQKKVVKCFNCGKEGHIAKNCRAPRKRGCWKCGREGHQMKDCTERQANFLGKIWPSHKGRPGNFLQSRPEPTAPPAESFGFGEETTTPSQKQEPIDKELYPLTSLRSLFGSDPSSQ

SEQ ID NO: 237 - protein, 501 aa, Human immunodeficiency virus
MGARASVLSGGKLDQWEKIRLRPGGKKKYRLKHLVWASRELERYALNPGLLETSDGCKQIIAQLQPSIPTGSEELKSLYNAVAVLYCVHQRIDVKDTKEALDKIEEEQNKSKKKAQQAAADTGNSSQVSQNYPIVQNLQGQMVHQAISPRTLNAWVKVVEEKAFSPEVIPMFSALSEGATPQDLNTMLNTVGGHQAAMQMLKETINDEAAEWDRLHPVHAGPIAPGQMREPRGSDIAGTTSTLQEQIGWMTNNPPIPVGEIYKRWIILGLNKIVRMYSPTSILDIRQGPKEPFRDYVDRFYKTLRAEQASQDVKNWMTETLLVQNANPDCKTILKALGPAATLEEMMTACQGVGGPGHKARVLAEAMSQMTGSATVMMQKGNFRNQRKIVKCFNCGKEGHIARNCRAPRKKGCWKCGREGHQMKDCNNERQANFLGKIWPSSKGRPGNFLQSRPEPTAPPEESFRFGEETATPPQKQEPRDKDLYPLASLKSLFGNDPSSQ

SEQ ID NO: 238 - protein, 500 aa, Human immunodeficiency virus
MGARASVLSGGELDKWEKIRLRPGGKKQYKLKHIVWASRELERFALNPGLLETSEGCRQILGQLQPALGTGTEELKSLFNTVAVLYCVHQKIAIKDTKEALDKIEEEQNKSKKKTQQAEADTGNRSQVSQNYPIVQNLQGQMVHQPIAPRTLNAWVKVVEEKAFSPEVIPMFSALSEGATPQDLNTMLNTVGGHQAAMQMLKETINEEAADWDRLHPVQAGPVAPGQMREPRGSDIAGTTSTLQEQIGWMTSNPPIPVGEIYKRWIILGLNKIVRMYSPTSILDIKQGPKEPFRDYVDRFYKTLRAEQASQDVKNWMTETLLVQNANPDCKTILKALGPAATLEEMMTACQGVGGPGHKARVLAEAMSQVTNSTTVMVQRGNFRNQRKTVKCFNCGKEGHIAKNCRAPRKKGCWKCGREGHQMKDCTERQANFLGKIWPSHKGRPGNFLQSRPEPTAPPAESFRFGEETTTPSQKQEPIDKELYPLASLRSLFGNDPSSQ

SEQ ID NO: 239 - protein, 502 aa, Human immunodeficiency virus
MGARASVLSGGELDRWEKIRLRPGGKKRYRLKHLVWASRELERFAVNPGLLETSGGCRQILEQLQPSLQTGSEELKSLYNTIAVLYCVHQKIEVKDTKEALDKIEEEQNKSKKKAQQAAADTGSNSKVSQNYPIVQNLQGQMVHQPMSPRTLNAWVKVIEEKAFSPEVIPMFSALSEGATPQDLNTMLNTVGGHQAAMQMLKETINEEAAEWDRMHPVHAGPVAPGQMREPRGSDIAGTTSTLQEQIAWMTSNPSIPVGEIYKRWIILGLNKIVRMYSPTSILDIRQGPKEPFRDYVDRFYKTLRAEQASQDVKNWMTETLLVQNANPDCKTILKALGPAATLEEMMTACQGVGGPGHKARVLAEAMSQVTNTNIMMQRGNFRNQRQTVKCFNCGKEGHIAKNCRAPRKRGCWKCGKEGHQMKDCTERQANFLGKIWPSNKGRPGNFLQNRPEPTAPPAPPEESFRFRGETTTPPQRQEPTDKELYPLASLKSLFGNDPSSQ

SEQ ID NO: 240 - protein, 497 aa, Human immunodeficiency virus
  misc_feature (193)..(193): Xaa can be any naturally occurring amino acid
MGARASVLSGGELDKWEKIRLRPGGKKQYKLKHIVWASRELERFAVNPGLLETSEGCRQILGQLHPSLQTGSEELKSLYNTVAVLYCVHQRIEVKDTKEALEKIEEEQNKAKKKAQQAAADTGNSQVSQNYPIVQNIQGQMVHQPISPRTLNAWVKVIEEKAFSPEVIPMFSALSEGATPQDLNTMLNTVGGXQAAMQMLKETINEEAADWDRLHPVQAGPVAPGQMREPRGSDIAGTTSTLQEQIGWMTSNPPIPVGEIYKRWIILGLNKIVRMYSPVSILDIRQGPKEPFRDYVDRFYKTLRAEQASQDVKNWMTETLLVQNANPDCKTILKALGPGATLEEMMTACQGVGGPGHKARVLAEAMSQATGPAAIMMQRGNFRGQRKIVKCFNCGKEGHIAKNCRAPRKRGCWKCGKEGHQMKDCTERQANFLGKIWPSHKGRPGNFPQNRLEPTAPPAESFREETTTPPQKQEPIDKELYPIPSLRSLFGNDPSSQ

SEQ ID NO: 241 - protein, 502 aa, Human immunodeficiency virus
MGARASVLSGGELDRWEKIRLRPGGKKKYRLKHIVWASRELERFAVNPSLLETSEGCRQILGQLQPSLQTGSEELRSLYNTVATLYCVHQKIDVKDTKEALDKIEEEQNKCKKKAQQAAAAADTGNNSQISQNYPIVQNVQGQMVHQAISPRTLNAWVKVIEEKAFSPEVIPMFSALSEGATPQDLNTMLNTVGGHQAAMQMLKETINEEAAEWDRLHPVHAGPIAPGQMREPRGSDIAGTTSTLQEQIGWMTHNPPIPVGEIYKRWIILGLNKIVRMYSPVSILDIKQGPKEPFRDYVDRFYKTLRAEQATQEVKNWMTETLLVQNANPDCKTILKALGPAATLEEMMTACQGVGGPGHKARVLAEAMSQVTNSTATAMMQRGNFRNQKIVKCFNCGKAGHIAKNCRAPRKKGCWKCGKEGHQMKDCTERQANFLGKIWPSHKGRPGNFLQNRPEPSAPPEESFRFGEETTTPSQKQEPKDKDLYPLASLRSLFGNDPSSQ

SEQ ID NO: 242 - protein, 500 aa, Human immunodeficiency virus
MGARASVLSGGELDRWEKIRLRPGGKKKYKLKHIVWASRELERFAVNPGLLETSEGCRQIIGQLQPSLQTGSEELKSLFNTVAVLYCVHQKIDIKDTKEALEKIEEEQNKSKKKAQQAAAGTGNSSQVSQNYPIVQNLQGQMVHQAISPRTLNAWVKVVEEKAFSPEVIPMFSALSEGATPQDLNTMLNTVGGHQAAMQMLKETINEEAAEWDRLHPVHAGPIAPGQMREPRGSDIAGTTSTLQEQIGWMTNNPPIPVGEIYKRWIILGLNKIVRMYSPTSILDIRQGPKEPFRDYVDRFYKTLRAEQATQEVKNWMTETLLVQNANPDCKTILKALGPAATLEEMMTACQGVGGPGHKARVLAEAMSQATNTVAIMMQRGNFKNQRKTIKCFNCGREGHIAKNCRAPRKKGCWKCGKEGHQMKDCTERQANFLGKIWPSHKGRPGNFLQNRPEPSAPPAESFRFGEETTTPSQKQEPIDKDLYPLASLRSLFGNDPSSQ

SEQ ID NO: 243 - protein, 497 aa, Human immunodeficiency virus
MGARASVLSGGELDKWEKIRLRPGGRKQYKLKHIVWASRELERFALNPGLLETSEGCRQILGQLQASLQTGSEELKSLYNTVAVLYCVHQRIDVKDTKEALEKIEEEQNKSKKKAQQAAADTGSSSQVSQNYPIVQNLQGQMVHQAISPRTLNAWVKVVEEKAFSPEVIPMFSALSEGATPQDLNTMLNTVGGHQAAMQMLKETINEEAAEWDRLHPVHAGPIAPGQIREPRGSDIAGTTSTLQEQIGWMTNNPPIPVGEIYKRWIILGLNKIVRMYSPTSILDIRQGPKEPFRDYVDRFYKTLRAEQASQEVKNWMTETLLVQNANPDCKTILKALGPAATLEEMMTACQGVGGPGHKARVLAEAMCQVTNPATVMMQRGNLKNQRKTVKCFNCGKEGHIARNCRAPRKKGCWKCGKEGHQMKDCTERQANFLGKIWPSHKGRPGNFLQSRPEPTAPPEESFKFGEETTTPPQKQGTIDKELYPLASLKSLFGNDQ

SEQ ID NO: 244 - protein, 502 aa, Human immunodeficiency virus
MGARASVLSGGELDKWEKIRLRPGGKKSYQLKHIVWASRELERFAVNPGLLETSEGCRQILGQLHPSLQTGSEELKSLYNTVAVLYCVHQRIEIKDTKEALDKIEEEQKQSKKKAQQAQAAAGTGSSSQVSQNYPIVQNLQGQMVHQAISPRTLNAWVKVVEEKAFSPEVIPMFSALSEGATPQDLNTMLNTVGGHQAAMQMLKETINEEAAEWDRLHPAHAGPIAPGQMREPRGSDIAGTTSTLQEQIGWMTHNPPIPVGEIYKKWIIMGLNKIVRMYSPTSILDIRQGPKEPFRDYVDRFYKTLRAEQATQEVKNWMTETLLVQNANPDCKTILKALGPAATLEEMMTACQGVGGPGHKARVLAEAMSQATNSAAIMMQRGNYKNQRKTVKCFNCGKEGHIARNCRAPRKKGCWKCGKEGHQMKDCTERQANFLGKIWPSHKGRPGNFLQSRPEPSAPPEESFRFGEETTAPSQKQEPTDKEMYPLASLKSLFGNDPSSQ

SEQ ID NO: 245 - protein, 508 aa, Human immunodeficiency virus
  misc_feature (283)..(283): Xaa can be any naturally occurring amino acid
MGARASVLSGGQLDKWEKIRLRPGGKKRYKLKHIVWASRELERFAVNPGLLETSGGCRQILELLQPSLQTGSEELRSVYNTVATLYCVHQQIEVKDTKEALDKVEEEQNKSKKKAQQAAAAADTGNSSQVSQNYPIVQNMQGQMVHQAISPRTLNAWVKVVEEKAFSPEVIPMFSALSDGATPQDLNTMLNTVGGHQAAMQMLKETINEEAAEWDRVHPVHAGPIAPGQMREPRGSDIAGTTSTLQEQIGWMTNNPPIPVGEIYKRWIILGLNKIVRMYSPTXILDIRQGPKESFRDYVDRFYKTLRAEQASQEVKNWMTETLLVQNANPDCRTILKALGPAATLEEMMTACQGVGGPGHKARVLAEAMSQVTNSATIMMQRGNFKNQKKTVKCFNCGKEGHIARNCRAPRKKGCWKCGKEGHQMKDCTERQANFLGKIWPSYKGRPGNFLQSRPEPTAPPEESFRFGEGTTTPTQKTTPSQEQEPIDKDLYPLASLKSLFGSDPSSQ

SEQ ID NO: 246 - protein, 500 aa, Human immunodeficiency virus
  misc_feature (108)..(108): Xaa can be any naturally occurring amino acid
MGARASVLSGGELDRWEKIRLRPGGKKKYKLKHIVWASRELERFAVNPGLLETSEGCRQILGQLQPALQTGSEELKSLYNTVATLYCVHQKIEIADTKEALEKIEEEXNKSKKKAQQAAAGPGSSSQVSQNYPIVQNIQGQMVHQALSPRTLNAWVKVVEEKAFSPEVIPMFSALSEGATPQDLNTMLNTVGGHQAAMQMLKETINEEAAEWDRLHPVQAGPVAPGQMREPRGSDIAGTTSNLQEQIAWMTNNPPIPVGEIYKRWIIMGLNKIVRMYSPTSILDIRQGPKEPFRDYVDRFYKTLRAEQASQEVKNWMTETLLVQNANPDCKTILKALGPAATLEEMMTACQGVGGPGHKARVLAEAMSQVTNSATIMVQGGNFKSQRKIVKCFNCGKEGHIAKNCRAPRKRGCWKCGKEGHQMKDCTERQANFLGKIWPSHKGRPGNFLQSRPEPTAPPEESFRFGEETTTPSQKQETIDKEGYPLTSLRSLFGNDPSSQ

SEQ ID NO: 247 - protein, 501 aa, Human immunodeficiency virus
  misc_feature (170)..(170): Xaa can be any naturally occurring amino acid
  misc_feature (192)..(192): Xaa can be any naturally occurring amino acid
  misc_feature (246)..(246): Xaa can be any naturally occurring amino acid
  misc_feature (249)..(249): Xaa can be any naturally occurring amino acid
  misc_feature (252)..(252): Xaa can be any naturally occurring amino acid
  misc_feature (277)..(277): Xaa can be any naturally occurring amino acid
  misc_feature (286)..(286): Xaa can be any naturally occurring amino acid
  misc_feature (300)..(300): Xaa can be any naturally occurring amino acid
  misc_feature (401)..(401): Xaa can be any naturally occurring amino acid
MGARASVLSGGELDRWEKIRLRPGGRKRYKLKHIIWASRELERFAVNPGLLETSEGCRQILGQLQPSLQTGSEELKSLYNTVAVLYCVHQKIDVKDTKEALDKIEEEQNKSKKKAQQAAAAADTGNSNQASQNYPIVQNLQGQMVHQALSPRTLNAWVKVIEEKAFSPEXIPMFSALSEGATPQDLNTMLNXVGGHQAAMQMLKETINEEAAEWDRLHPVHAGPIAPGQMREPRGSDIAGTTSTLXEQXAWXTNNPPIPVGEIYKRWIILGLNKIVXMYSPVSILXIRQGPKEPFRDYVXRFYKTLRAEQASQDVKNWMTETLLVQNANPDCKTILKALGPAATLEEMMTACQGVGGPGHKARVLAEAMSQVNSTTIMMQKGKFRNQRKTVKCFNCGKEGXIARNCRAPRKKGCWKCGREGHQMKDCTERQANFLGKIWPSSKGRPGNFLQSRPEPTAPPAESFGFGEETTTPSQKQDQKEKELYPLASLRSLFGNDPLSQ

SEQ ID NO: 248 - protein, 501 aa, Human immunodeficiency virus
  misc_feature (81)..(81): Xaa can be any naturally occurring amino acid
  misc_feature (118)..(118): Xaa can be any naturally occurring amino acid
  misc_feature (353)..(353): Xaa can be any naturally occurring amino acid
  misc_feature (484)..(484): Xaa can be any naturally occurring amino acid
MGARASILSGGELDRWEKIRLRPGGKKKYRLKHLVWASRELERFAVNPGLLETSEGCRQLLGQLQPSLQTGSEELKSLYNXIAVLYCVHQRIDVKDTKDALDKIEEEQNKSRKKAQQXAADTGNNSQVSQNYPIVQNLQGQMVHQAISPRTLNAWVKVVEEKAFSPEVIPMFSALSEGATPQDLNTMLNTVGGHQAAMQMLKETINEEAAEWDRLHPVHAGPVAPGQMRDPRGSDIAGTTSTLQEQIGWMTSNPPIPVGEIYKRWIILGLNKIVRMYSPTSILDIRQGPKEPFRDYVDRFYKTLRAEQATQEVKNWMTETLLVQNANPDCKTILKALGPAATLEEMMTACQGXGGPGHKARVLAEAMSQATNSNTIMMMQRGNFRNQRKTIKCFNCGKEGHLARNCRAPRKKGCWKCGKEGHQMKDCTERQANFLGKIWPSYKGRPGNFLQSRPEPTAPPEESFRFGKETTTPPQKQEPIDKDXYPLASLRSLFGNDPSSQ

SEQ ID NO: 249 - protein, 500 aa, Human immunodeficiency virus
  misc_feature (462)..(462): Xaa can be any naturally occurring amino acid
  misc_feature (469)..(469): Xaa can be any naturally occurring amino acid
MGARASVLSGGELDKWEKIRLRPGGKKKYKLKHIVWASRELERFAVNPGLLETSEGCRQILGQLQPALQTGSEELRSLYNTVATLYCVHQKIEVKDTKEALEKIEEEQNKSKKKVQQAAADTGNSSQVSQNYPIVQNMQGQMVHQPLSPRTLNAWVKVVEEKAFSPEVIPMFTALSEGATPQDLNTMLNTVGGHQAAMQMLKETINEEAAEWDRLHPVHAGPVAPGQMREPRGSDIAGTTSNLQEQIGWMTNNPPIPVGEIYKRWIILGLNKIVRMYSPTSILDIRQGPKEPFRDYVDRFYKTLRAEQASQEVKNWMTETLLVQNANPDCKTILKALGPAATLEEMMTACQGVGGPGHKARVLAEAMSQVTNSATAMVQRSNFRNQRKIVKCFNCGKEGHIARNCRAPRKKGCWKCGKEGHQMKDCTERQANFLGKIWPSHKGRPGNFLQNRPEPTAPPEEXFRFGEEXTTPSQKQEPIDKELHPLASLRSLFGNDPSSQ

SEQ ID NO: 250 - protein, 504 aa, Human immunodeficiency virus
  misc_feature (72)..(72): Xaa can be any naturally occurring amino acid
  misc_feature (79)..(79): Xaa can be any naturally occurring amino acid
  misc_feature (135)..(135): Xaa can be any naturally occurring amino acid
  misc_feature (186)..(186): Xaa can be any naturally occurring amino acid
  misc_feature (259)..(259): Xaa can be any naturally occurring amino acid
  misc_feature (295)..(295): Xaa can be any naturally occurring amino acid
  misc_feature (357)..(357): Xaa can be any naturally occurring amino acid
  misc_feature (383)..(383): Xaa can be any naturally occurring amino acid
MGARASVLSGGELDRWEKIRLRPAGKKKYRLKHIVWASRELERFAVNPGLLETSEGCKQIMGQLHPSLQTGXEELKSLXNAIAVLYCVHQKIEVKDTKEALEKIEEEQNKYKKKAQQAAADTGNSSQVSQNFPIXQNIQGQMVHQAISPRTLNAWVKVVEEKAFSPEVIPMFSALSEGATPQDLNXMLNTVGGHQAAMQMLKETINEEAAEWDRLHPVQAGPVAPGQMREPRGSDIAGTTSNLQEQIAWMTHNPPVPVXEIYKRWIILGLNKIVRMYSPTSILDIRQGPKEPFRXYVDRFYKTLRAEQASQEVKNWMTETLLVQNANPDCKTILKALGPAATLEEMMTACQGVGGPXHKARILAEAMSQATNSVAMTMMQRGXFRNQRKIVKCFNCGKEGHIAKNCRAPRKKGCWKCGKEGHQMKDCTERQANFLGKIWPSHSGRPGNFLQSRPEPTVPTAPPAESFRFGEETTTPSQKQEPIDKELYPLASLKSLFGNDPSSQ

SEQ ID NO: 251 - protein, 500 aa, Human immunodeficiency virus
  misc_feature (86)..(86): Xaa can be any naturally occurring amino acid
MGARASILSGGELDRWEKIRLRPGGKKKYKLKHLVWASRELERFAVNPGLLETSEGCRQLLGQLQPALQTGSEELKSVYNTIATLXCVHQRIEVKDTKEALDKIEEEQNKSKKRVQQAAAATGISGQVSQNYPIVQNIQGQMVHQPISPRTLNAWVKVVEEKAFSPEVIPMFSALAEGATPQDLNTMLNTVGGHQAAMQMLKETINEEAAEWDRLHPVQAGPIAPGQMREPRGSDIAGTTSTLQEQIGWMTNNPPIPVGEIYKRWIIMGLNKIVRMYSPTSILDIRQGPKEPFRDYVDRFYKTLRAEQASQEVKNWMTETLLVQNSNPDCKTILKALGPAATLEEMMTACQGVGGPGHKARVLAEAMSQVTNPATIMMQRGNFKNQRKIVKCFNCGREGHIAKNCRAPRKKGCWKCGKEGHQMKDCTERQANFLGKIWPSYKGRPGNFPQSRLEPTAPPEESLRFGEETATPHQKQEPIDKELYPLASLRSLFGNDPSSQ

SEQ ID NO: 252 - protein, 497 aa, Human immunodeficiency virus
MGARASVLSAGELDNWEKIRLRPGGKKKYRLKHIVWASRELERFAVNPGLLETSEGCRQILGQLQPSLQTGSEELRSLYNTVATLYCVHQKIKVKDTKEALEKIEEEQNKSKKKAQQAAADSNQVSQNYPIVQNLQGQMVHQAISPRTLNAWVKVVEEKAFSPEVIPMFSALSEGATPQDLNTMLNTVGGHQAAMQMLKETINEEAAEWDRLHPVHAGPIAPGQMREPRGSDIAGTTSTLQEQIGWMTNNPPIPVGEIYKRWIILGLNKIVRMYSPTSILDIRQGPKESFRDYVDRFYKTLRAEQASQEVKNWMTETLLVQNANPDCKTILKALGPAATLEEMMTACQGVGGPSHKARVLAEAMSQVTNPATIMMQRGNFRNQRKTVKCFNCGREGHIAKNCRAPRKKGCWKCGKEGHQMKDCTERQANFLGKIWPSHKGRPGNFLQSRPEPTAPPEESFRFGEEATTPSQKQEPIDKELYPLASLRSLFGNDPSSQ

SEQ ID NO: 253 - protein, 499 aa, Human immunodeficiency virus
MGARASVLSGGELDRWEKIRLRPGGKKKYKLKHIVWASRELERFAVNPGLLETSEGCKQILEQLQPALQTGSEELRSLYNTVATLYCVHQKVEVKDTKEALEKIEEEQNKSKKRAQQTADTGKSSQVSQNYPIVQNLQGQMVHQALSPRTLNAWVKVVEEKAFSPEVIPMFTALSEGATPQDLNTMLNTVGGHQAAMQMLKETINEEAADWDRLHPVHAGPIAPGQMREPRGSDIAGTTSTLQEQIGWMTNNPPIPVGEIYKRWIIMGLNKIVRMYSPTSILDIRQGPKESFRDYVDRFYKTLRAEQCSQDVKNWMTETLLVQNANPDCKTILKALGPAATLEEMMTACQGVGGPGHKARVLAEAMSQVTNSTTIMMQRGNFRSQRKIVKCFNCGKEGHIAKNCRAPRKKGCWKCGKEGHQMKDCTERQANFLGKIWPSYKGRPGNFLQSRPEPTAPPAESFRFGEETTTPSQKQEPIDRELYPLASLKSLFGNDPSSQ

SEQ ID NO: 254 - protein, 500 aa, Human immunodeficiency virus
  misc_feature (54)..(54): Xaa can be any naturally occurring amino acid
  misc_feature (69)..(69): Xaa can be any naturally occurring amino acid
  misc_feature (118)..(118): Xaa can be any naturally occurring amino acid
  misc_feature (148)..(148): Xaa can be any naturally occurring amino acid
  misc_feature (214)..(214): Xaa can be any naturally occurring amino acid
  misc_feature (252)..(252): Xaa can be any naturally occurring amino acid
  misc_feature (268)..(268): Xaa can be any naturally occurring amino acid
  misc_feature (300)..(300): Xaa can be any naturally occurring amino acid
  misc_feature (478)..(478): Xaa can be any naturally occurring amino acid
MGARASVLSGGELDKWEKIRLRPGGKKRYKLKHIVWASRELERFAVNPGLLETXEGCRQILGQLQPALXTGSEELRSLFNTVATLYCVHQKIEVKDTKEALEKIEEEQNKSKKKAQQXAAGTGNSSQVSQNYPIVQNLQGQMVHQPLXPRTLNAWVKVVEEKAFSPEVIPMFSALSEGATPQDLNTMLNTVGGHQAAMQMLKETINEEAAEWDXLHPVHAGPIAPGQMREPRGSDIAGTTSNLQEQIGWMTXNPPIPVGEIYKRWIIXGLNKIVRMYSPTSILDIRQGPKEPFRDYVDRXYKTLRAEQASQEVKNWMTETLLVQNANPDCKTILKALGPAATLEEMMTACQGVGGPGHKARVLAEAMSQVTSSATIMMQRGNFRNQRKTVKCFNCGREGHIAKNCRAPRKKGCWKCGKEGHQMKDCTERQANFLGKIWPSYKGRPGNFLQSRPEPTAPPEESFRFGEETTTPSQKQEXIDKDLYPLTSLRSLFGNDPSSQ

SEQ ID NO: 255 - protein, 500 aa, Human immunodeficiency virus
  misc_feature (335)..(335): Xaa can be any naturally occurring amino acid
MGARASVLSGGKLDRWEKIRLRPGGKKKYKLKHIVWASRELERFAVNPGLLETAEGCRQILGQLQPSLQTGSEELKSLFNTVVTLYCVHQRIDVKDTKEALEKIEEEQNKCKKKAQQAAADTGNTGNSSQVSQNYPIVQNMQGQMVHQAISPRTLNAWVKVVEEKAFSPEVIPMFSALSEGATPQDLNTMLNTVGGHQAAMQMLKETINEEAAEWDRLHPVHAGPIAPGQMREPRGSDIAGTTSTLQEQIGWMTHNPPIPVGEIYKRWIILGLNKIVRMYSPTSILDIRQGPKEPFRDYVDRFYRTLRAEQASQEVKNWMTETLLVQNANPDCKXILKALGQGATLEEMMTACQGVGGPSHKARVLAEAMSQATSVNIMMQKGNFRGQRKTVKCFNCGREGHIAKNCRAPRKKGCWKCGKEGHQMKDCSERQANFLGRIWSSHKGRPGNFLQNRTEPTAPPEEIVRFGEETTTPSQKQESGELYPLTSLKSLFGNDPSSL

SEQ ID NO: 256 - protein, 500 aa, Human immunodeficiency virus
  misc_feature (91)..(91): Xaa can be any naturally occurring amino acid
  misc_feature (140)..(140): Xaa can be any naturally occurring amino acid
  misc_feature (186)..(186): Xaa can be any naturally occurring amino acid
  misc_feature (191)..(191): Xaa can be any naturally occurring amino acid
  misc_feature (219)..(219): Xaa can be any naturally occurring amino acid
  misc_feature (404)..(404): Xaa can be any naturally occurring amino acid
MGARASILSGGELDRWERIRLRPGGKKKYKLKHLVWASRELERFAVNPGLLETSEGCRQILGQLQPFLQTGSEELKSLYNAVATLYCVHQXIEVKDTKEALEKIEEEQNKSKQKAKQAAAGPGNSSQVSQNYPIVQNLQXQMVHQALSPRTLNAWVKVVEEKAFSPEVIPMFSALSEGATPQDLNXMLNTXGGHQAAMQMLKETINEEAAEWDRLHPVXAGPIAPGQLREPRGSDIAGTTSNLQEQIGWMTHNPPIPVGEIYKRWIIMGLNKIVRMYSPTSILDIKQGPKESFRDYVDRFYKTLRAEQASQEVKNWMTETLLVQNANPDCKTILKALGPAATLEEMMTACQGVGGPSHKARVLAEAMSQVTSSATVMMQKGNFKSQKRNIKCFNCGREGHLARXCRAPRKKGCWKCGKEGHQMKDCTERQANFLGKIWPSSRGRPGNFLQSRPEPTAPPEESFRFGEETTTPPQKQETKDKELYPLASLRSLFGNDPSSQ

SEQ ID NO: 257 - protein, 502 aa, Human immunodeficiency virus
  misc_feature (12)..(12): Xaa can be any naturally occurring amino acid
  misc_feature (136)..(136): Xaa can be any naturally occurring amino acid
  misc_feature (225)..(225): Xaa can be any naturally occurring amino acid
  misc_feature (270)..(270): Xaa can be any naturally occurring amino acid
  misc_feature (286)..(286): Xaa can be any naturally occurring amino acid
  misc_feature (333)..(333): Xaa can be any naturally occurring amino acid
  misc_feature (392)..(392): Xaa can be any naturally occurring amino acid
  misc_feature (407)..(407): Xaa can be any naturally occurring amino acid
  misc_feature (454)..(454): Xaa can be any naturally occurring amino acid
MGARASVLSGGXLDRWEKIRLRPGGKKKYKLKHIVWASRELERFAVNPGLLETSAGCRQILGQLQPSLQTGSEELKSLYNTVATLYCVHQKIEVKDTKEALERIEEEQNKSKKKVQQATADTGNSNSSQVSQNYPXVQNLQGQMVHQALSPRTLNAWVKVVEEKAFSPEVIPMFSALSEGATPQDLNTMLNTVGGHQAAMQMLKETINEEAAEWDRLHPVHAGPXAPGQMREPRGSDIAGTTSTLQEQIAWMTNNPPIPVGEIYKRWIIXGLNKIVRMYSPVNILXIRQGPKEPFRDYVDRFYKTLRAEQASQDVKNWMTETLLVQNANPDCXTILKALGPAATLEEMMTACQGVGGPGHKARVLAEAMSQVTSSATIMMQKGNFKNQRKAXKCFNCGKEGHIARNXRAPRKKGCWKCGKEGHQMKDCTERQANFLGKIWPSHKGRPGNFLQSXPEPTAPPEESFRFGEETTTPSQKQEPIDKDLYPLASLRSLFGNDPSSQ

SEQ ID NO: 258 - protein, 500 aa, Human immunodeficiency virus
MGARASVLSGGELDRWEKIRLRPGGKKKYRLKHIVWASRELERFAINPGLLETSGGCKQILEQLQSALQTGSEELRSLYNTVATLYCVHQKIDVKDTKEALDKIEEEQNKSKKKAQQAAADTGKSSLVSQNYPIVQNLQGQMVHQAISPRTLNAWVKVVEEKAFSPEVIPMFSALSEGATPQDLNTMLNTVGGHQAAMQMLKETINEEAAEWDRVHPVHAGPIAPGQMREPRGSDIAGTTSTLQEQIGWMTNNPPIPVGEIYKRWIILGLNKIVRMYSPTSILDIRQGPKEPFRDYVDRFYKTLRAEQASQEVKNWMTETLLVQNANPDCKTILKALGPAATLEEMMTACQGVGGPGHKARVLAEAMSQVTNSATIMIQKGNFRNQRKTVKCFNCGKEGHKARNCRAPRKKGCWKCGKEGHQMKDCTERQANFLGKIWPSHKGRPGNFLQNRPEPTAPPEESFRFGEETATPSQKQGTIDKELPPLTSLRSLFGNDPLSQ

SEQ ID NO: 259 - protein, 502 aa, Human immunodeficiency virus
  misc_feature (324)..(324): Xaa can be any naturally occurring amino acid
MGARASVLSGGQLDRWEKIRLRPGGKKQYRLKHLVWASRELERFSINPNLLETAEGCRQILGQLQPALQTGSEELKSLFNTVAVLYCVQQRIDVKDTKEALDKIEEEQNKSKAKTQQAAAGTGNSSQVSQNYPIVQNLQGQMVHQPISPRTLNAWVKVIEEKAFSPEVIPMFTALSEGATPQDLNTMLNTVGGHQAAMQMLKETINEEAAEWDRLHPVHAGPVAPGQMREPRGSDIAGTTSTLQEQIGWMTSNPAIPVGEIYKRWIILGLNKIVRMYSPVSILDIRQGPKEPFRDYVDRFYKTLRAEQASQDVKNWMTETLLVXNANPDCRTILKALGPAATLEEMMTACQGVGGPGHKARVLAEAMSQAQNSNIVMMQKGNFRNQRKTVKCFNCGKEGHIARNCRAPRKRGCWRCGKEGHQMKDCTERQANFLGKIWPSHKGRPGNFLQSRPEPTAPPEESFRFGEETTAPSQKKEQGDKDKDLYPLNSLRSLFGNDPLSQ

SEQ ID NO: 260 - protein, 501 aa, Human immunodeficiency virus
  misc_feature (195)..(195): Xaa can be any naturally occurring amino acid
MGARASILSGGELDRLEKIRLRPGGKKKYRLKHLVWASRELERFAVNPGLLETSDGCKQILIQLQPSLQTGSEELKSLFNTVAVLYCVHQKIEIKDTKEALDKIEEEQNKSKKKVQQAAAAADTGNNSQVSQNYPIVQNLQGQMVHQSLSPRTLNAWVKVVEEKAFSPEVIPMFSALSEGATPQDLNTMLNTVGXHQAAMQMLKETINEEAAEWDRMHPVHAGPIAPGQMREPRGSDIAGTTSTLQEQVAWMTSNPPVPVGEIYKRWIILGLNKIVRMYSPVSILDIRQGPKEPFRDYVDRFYKTLRAEQASQDVKNWMTETLLVQNANPDCKTILKALGPAATLEEMMTACQGVGGPGHKARVLAEAMSQVTNPANIMMQRGNFKNQRRIVKCFNCGKEGHVAKHCRAPRKKGCWKCGKEGHQMKDCVERQANFLGKIWPSHKGRPGNFLQSRPEPTAPPEEIFRFGEEPTAPPQKQEARDEKYPLTALRSLFGNDPSSQ

SEQ ID NO: 261 - protein, 509 aa, Human immunodeficiency virus
MGARASVLSGGELDRWEKIRLRPGGKKKYRLKHIVWASRELERFAVNPGLLETSEGCRQILGQLQPSLQTGSEELRSLYNTIAVLYCVHQRIDVKDTKEALEKIEEEQNKSKKKAQQAQQAAAAAADTGNSKQVSQNYPIVQNMQGQMVHQAISPRTLNAWVKVIEEKAFSPEVIPMFTALSEGATPQDLNTMLNTVGGHQAAMQMLKETINEEAAEWDRVHPVHAGPVAPGQMREPRGSDIAGTTSTLQEQVGWMTSNPPIPVGEIYKRWIILGLNKIVRMYSPVSILDIRQGPKEPFRDYVDRFYKTLRAEQASQEVKNWMTETLLVQNSNPDCKTILKALGPGATLEEMMTACQGVGGPSHKARVLAEAMSQATNAATIMMQKGNFRNQRKPVKCFNCGKEGHIARNCRAPRKRGCWKCGKEGHQMKDCTERQVNFLGKIWPSHKGRPGNFLQNRLEPTAPSAPPAESFGFGEETATPPQKQEQIDKELYPLTSLKSLFGNDLLSQ

SEQ ID NO: 262 - protein, 499 aa, Human immunodeficiency virus
MGARASVLSGGKLDQWEKIRLRPGGKKKYKLKHIVWASRELERFAVNPGLLETSEGCKQILGQLQPSLQTGSEELKSLYNTVAVLYCVHQRIEVRDTKEALDRIEEEQNKSKKKAQQAAADTGNSNQVSQNYPIVQNLQGQMVHQAISPRTLNAWVKVIEEKAFSPEVIPMFSALSEGATPGDLNTMLNTVGGHQAAMQMLKETINEEAAEWDRLHPVQAGPIAPGQIREPRGSDIAGTTSTLQEQITWMTSNPPIPVGDIYKRWIILGLNKIVRMYSPTSILDIRQGPKEPFRDYVDRFYKTLRAEQCTQEVKNWMTETLLVQNANPDCRTILKALGPAATLEEMMTACQGVGGPGHKARVLAEAMSQVTNSATIMMQRGNFKNQRKNVKCFNCGKEGHIAKNCRAPRRKGCWKCGKEGHQMKDCSERQANFLGKIWPSYKGRPGNFLQSRPEPTAPPEESFRLGEETTPPQRRESIDKEKYPLTSLRSLFGNDPLSQ

SEQ ID NO: 263 - protein, 503 aa, Human immunodeficiency virus
MGARASVLSGGELDRWEKIRLRPGGKKKYKLKHIVWASRELERFAVNPGLLETSEGCRQILGQLQPSLQTGSEEFRSLYNAIAVLYCVHQRIDVKDTKEALEKIEEEQTKSKKKAQQAAAAAAATGNSSQVSQNYPIVQNMQGQMVHQAISPRTLNAWVKVVEEKAFSPEVIPMFAALSEGATPQDLNLMLNTVGGHQAAMQMLKETINEEAAEWDRLHPVHAGPVAPGQMREPRGSDIAGTTSTLQEQIAWMTSNPPIQVGEIYKRWIILGLNKIVRMYSPTSILDIKQGPKEPFRDYVDRFYRTLRAEQASQEVKNWMTETLLVQNSNPDCKTILKALGPAATLEEMMTACQGVGGPSHKARVLAEAMSQVTNPTTIMMQKGNFRNQRRSIKCFNCGKEGHTAKNCRAPRKKGCWKCGKEGHQMKDCTERQANFLGKIWPSHKGRPGNFLQSRPEPSAPPAESFGFGEETTTPSQKQETVDKELYPLASLKSLFGNDPSSQ

SEQ ID NO: 264 - protein, 507 aa, Human immunodeficiency virus
MGARASVLSGGQLDKWEKIRLRPGGKKKYKLKHIVWASRELERYALNPGLLETAEGCRQILGQLQPSLPTGSEELKSLFNTVATLYCVHQRIEVKDTKEALDKIEEEQNKSKKKVQQEAAAADTGNNNQVSQNYPIVQNLQGQHVHQAISPRTLNAWVKVVEEKAFSPEVIPMFSALSEGATPQDLNTMLNTVGGHQAAMQMLKETINEEAAEWDRLHPVHAGPIAPGQMREPRGSDIAGTTSTLQEQIAWMTNNPPIPVGEIYKRWIILGLNKIVRMYSPTSILDIRQGPKEPFRDYVDRFYKTLRAEQASQEVKNWMTETLLVQNANPDCRNILKALGPAATLEEMMTACQGVGGPGHKARVLAEAMSQVTNSATIMMQKGNFRDKRKTVKCFNCGREGHIARNCRAPRKRGCWKCGKEGHQMKDCTERQANFLGKIWPSSKGRPGNFLQSRPEPSAPPEPSAPPEESFRFGEETTPAQKQERTDRELYPLASLRSLFGNDPLSQ

SEQ ID NO: 265 - protein, 503 aa, Human immunodeficiency virus
MGARASVLSGGELDRWEKIRLRPGGKKKYKLKHIVWASRELERFAVNPGLLETSGGCRQILEQLQPSLQTGSEELKSLYNTVATLYCVHQRMEIKDTKEALDKIEEERTKSKKKAQAQQAAAADTGNSSQVSQNYPIVQNAQGQMVHQAISPRTLNAWVKVVEEKAFNPEVIPMFAALSEGATPQDLNTMLNTVGGHQAAMQILKETINEEAAEWDRLHPVHAGPIAPGQMREPRGSDIAGTTSTLQEQIGWMTHNPPIPVGEIYKKWIIMGLNKIVKMYSPISILDIRQGPKEPFRDYVDRFYKTLRAEQASQEVKNWMTETLLVQNANPDCKTILKALGPAATLEEMMTACQGVGGPGHKARVLAEAMSQVTNSATIMMQKGNFRNQRKTVKCFNCGKEGHIARNCRAPRKRGCWKCGKEGHQMKDCTERQANFLGKIWPSHKGRPGNFLQSRPEPSAPPEESFRFGEETATPPQKQEQTDKELYPLASLRSLFGNDPSSQ

SEQ ID NO: 266 - protein, 497 aa, Human immunodeficiency virus
MGARASVLSGGKLDQWERIRLRPGGNKRYKLKHIVWASRELERFAVNPGLLETSEGCRQILKQLHPSLQTGSEELKSLYNTVATLYCVHQRIDIKDTKEALDKIEEEQNQCKKKAQQAAAGTGSSSQASQNYPIVQNMQGQMVHQAISPRTLNAWVKVIEEKAFSPEVIPMFSALSEGATPADLNTMLNTVGGHQAAMQMLKETINEEAAEWDRMHPVHAGPVAPGQMREPRGSDIAGTTSTLQEQIAWMTSNPPIPVGDIYKRWIILGLNKIVRMYSPVSILDIKQGPKEPFRDYVDRFYKTLRAEQATQEVKNWMTETLLVQNANPDCKTILKALGPAATLEEMMTACQGVGGPGHKARVLAEAMSQVTSSAAIMMQRGNFGDQRKTVKCFNCGREGHVAKNCRAPRKKGCWKCGKEGHQMKDCTGRQANFLGKIWPAHRDRPGNFLQNRPEPTAPPEESFRFGEETTTPPQKQGKEDKELYPSTSLKSLFGNDP

SEQ ID NO: 267 - protein, 502 aa, Human immunodeficiency virus
MGARASILSGGELDKLEKIRLRPGGKKKYRLKHIVWASRELERFAVNPGLLETSEGCRQILGQLQPALQTGSEELRSLYNTVAVLYCVHQRIEIKDTKEALDKIEEEQTKSKKKTQQAAADTGNNSQVKVSQNYPIVQNLQGQMVHQAISPRTLNAWVKVVEEKAFSPEVIPMFSALSEGATPQDLNTMLNTVGGHQAAMQMLKETINEEAAEWDRLHPVHAGPIAPGQMREPRGSDIAGTTSTLQEQIGWMTNNPPIPVGEIYKRWIILGLNKIVRMYSPTSILDIRQGPKEPFRDYVDRFYKTLRAEQASQDVKNWMTETLLVQNANPDCKTILKALGPAATLEEMMTACQGVGGPSHKARVLAEAMSQATNSNTIMMQRGNFRNQRKTIKCFNCGKEGHLARNCRAPRKKGCWKCGKEGHQMKDCIERQANFLGKIWPSHKGRPGNFPQSRPEPTAPPEESFRFGEETTTPPPKQEPIDKGLYPSVSLKSLFGNDPLSQ

SEQ ID NO: 268 - protein, 500 aa, Human immunodeficiency virus
MGARASVLSGGKLDTWEKIRLRPGGKKQYKLKHIVWASRELERFALNPGLLETSEGCKQILEQLQPALQTGTEELRSLFNTVATLYCVHQRIDVKDTKEALDKIEEMQSKSKKPTQQAAADTGNSRQVSQNYPIVQNLQGQMVHQALSPRTLNAWVKVIEEKAFSPEVIPMFTALSEGATPQDLNTMLNTVGGHQAAMQILKETINEEAAEWDRLHPVQAGPVAPGQMRDPRGSDIAGTTSTLQEQIGWMTHNPPIPVGDIYKRWIILGLNKIVRMYSPTSILDIRQGPKEPFRDYVDRFYKTLRAEQASQDVKNWMTETLLVQNANPDCKTILKALGPGATLEEMMTACQGVGGPGHKARVLAEAMSQVTNSTAVMMQRGNFKNQRKPVKCFNCGREGHIARNCKAPRKKGCWKCGKEGHQMKDCTERQANFLGKIWPSHKGRPGNFLQSRPEPTAPPAESFGFGEETTTPSQKQEPIDKEQYPLTSLRSLFGNDPSSQ

SEQ ID NO: 269 - protein, 508 aa, Human immunodeficiency virus
MGARASILSGGALDKWEKIRLRPGGKKRYQFKHIIWASRELERFALNPGLLETAEGCRQILGQLQPSLQTGTEELRSLYNTVAVLYCVHQRIDVKDTKEAIEKIEEEQNKSKKKAQQAAAAAADTGNSSTGNNSKVSQNYPIVQNLQGQMVHQPISPRTLNAWVKVVEEKAFSPEVIPMFTALSEGATPQDLNTMLNTVGGHQAAMQMLKETINEEAAEWDRLHPVQAGPVAPGQMREPRGSDIAGTTSTLQEQIGWMTSNPPIPVGEIYKRWIILGLNKIVRMYSPTSILDIRQGPKEPFRDYVDRFYKTLRAEQASQEVKNWMTETLLVQNANPDCRTILKALGPAATLEEMMTACQGVGGPGHKARVLAEAMSQVTNSNTVMMQKGNFKNQRKTVKCFNCGKEGHIARNCRAPRKRGCWKCGKEGHQMKDCTERQANFLGKIWPSHKGRPGNFLQSRPEPSAPPAESFRFGEETTTPPQKQEPMDKELYPLASLRSLFGNDPSSQ

SEQ ID NO: 270 - protein, 504 aa, Human immunodeficiency virus
MGARASVLSGGELDKWEKIRLRPGGKKQYRLKHIVWASRELERFAVNPGLLETSNGCRQILGQLQPSLQTGSEELRSLYNTVATLYCVHQKIDVRDTKEALEKIEEEQTKSKKKAQQAAAAADTGNSSQGVSQNYPIVQNLQGQMVHQAISPRTLNAWVKVVEEKAFSPEVIPMFSALSEGATPQDLNTMLNTVGGHQAAMQMLKETINEEAAEWDRLHPVHAGPVAPGQMREPRGSDIAGTTSTLQEQIGWMTNNPPIPVGEIYKRWIILGLNKIVRMYSPTSILDIRQGPKEPFRDYVDRFYKTLRAEQASQEVKNWMTETLLVQNANPDCKTILKALGPAATLEEMMTACQGVGGPGHKARVLAEAMSQATGAATILMQRGNFRNQRKNVKCFNCGKEGHIARNCRAPRKKGCWKCGKEGHQMKDCTERQANFLGKIWPSHKGRPGNFLQNRPEPTAPPEESFRFGEETMTPPQKKQEPTDKELYPLASLRSLFGNDPSSQ

SEQ ID NO: 271 - protein, 505 aa, Human immunodeficiency virus
MGARASVLSGGDLDKWERIRLRPGGRKKYQLKHIVWASRELERFAVNPGLLETSGGCRQILTQLQPSLQTGSEELKSLYNTVATLYCVHQKIDVKDTKEALDKIEEEQNKSKKKAQQAAANTGAAAATGTSSQDSQNYPIVQNLQGQMVHQAISPRTLNAWVKVIEEKAFSPEVIPMFSALSEGATPQDLNTMLNTVGGHQAAMQMLKETINEEAAEWDRLHPVHAGPIAPGQMREPRGSDIAGTTSTLQEQIGWMTNNPPIPVGEIYKRWIILGLNKIVRMYSPVSILDIRQGPKEPFRDYVDRFYKTLRAEQASQDVKNWMTETLLVQNANPDCKTILKALGPAATLEEMMTACQGVGGPGHKARVLAEAMSQVTNSATIMMQRGNFRSQRKIVKCFNCGKEGHIARNCRAPRKKGCWKCGKEGHQMKDCTNERQANFLGKIWPSHKGRPGNFLQSRPEPTAPPAESFRFGEETTATAPPQKQEELYPLASLRSLFGNDPLSQ

SEQ ID NO: 272 - protein, 505 aa, Human immunodeficiency virus
MGARASVLSGGKLDKWEKIRLRPGGRKKYHLKHIVWASRELERFAVNPGLLETSEGCRQILGQLQPSLQTGTEELRSLYNTIATLYCVHQGVDVKDTKEALEKVEEEQNKSKKKAQQAAADAGNSSSQVSQNYPIVQNLQGQMVHQPISPRTLNAWVKVVEEKAFSPEVIPMFSALSEGATPQDLNTMLNTVGGHQAAMQMLKETINEEAAEWDRLHPVHAGPIAPGQMREPRGSDIAGTTSTLQEQIGWMTHNPPIPVGDIYKRWIILGLNKIVRMYSPTSILDIKQGPKEPFRDYVDRFYKVLRAEQASQDVKNWMTETLLVQNANPDCKTILKALGPAATLEEMMTACQGVGGPGHKARVLAEAMCLVTSPATIMMQKGNFRNQRRPVKCFNCGKEGHIARNCRAPRKRGCWKCGQEGHQMKDCTERQANFLGKLWPSHRGRPGNFLQSRPEPTAPPEESFRFGEETITPSQKQEPPQKQEPEELYPLASLRSLFGNDPSSQ

SEQ ID NO: 273 - protein, 499 aa, Human immunodeficiency virus
MGARASVLSGGELDRWEKIRLRPGGKKRYKLKHIVWASRELERFAVNPGLLETSEGCRQILGQLQPSLQTGSEELKSLFNTVAVLYCVHQRIEIKDTKEALDKIEEEQNKSKKKAQQAAADTGNSSQVSQNYPIVQNLQGQMVHQPISPRTLNAWVKVVEEKAFSPEVIPMFTALSEGATPQDLNTMLNTVGGHQAAMQMLKETINEEAAEWDRLHPVHAGPIAPGQMREPRGSDIAGTTSTLQEQIAWMTNNPPIPVGDIYKRWIILGLNKIVRMYSPSSILDIRQGPKEPFRDYVDRFYKTLRAEQASQDVKNWMTETLLVQNANPDCKTILKALGPGATLEEMMTACQGVGGPGHKARVLAEAMSQVTNSTNVMMQRGNFRNQRKPVKCFNCGKEGHIARNCRAPRKKGCWKCGKEGHQMKDCTERQANFLGKIWPSHKGRPGNFLQSRPEPTAPPEESLRFGEETTPSQKQGTIDKELYPWTSLKSLFGNDPSSQ

SEQ ID NO: 274 - protein, 502 aa, Human immunodeficiency virus
MGARASVLSGGELDRWEKIRLRPGGKKQYKLKHIVWASRELERFAVNPGLLETSEGCRKILEQLQPSLQTGSEELKSLFNTVAVLYCVHQKIDVRDTKEALDKIEEEQNKSKKKAQQAAAGTGNSSSSQASQNYPIVQNLQGQMVHQAISPRTLNAWVKVVEEKAFSPEVIPMFSALSEGATPQDLNTMLNTVGGHQAAMQMLKETINEEAAEWDRLHPVHAGPIAPGQMREPRGSDIAGTTSTLQEQIGWMTNNPPIPVGEIYKRWIILGLNKIVRMYSPTSILDIKQGPKEPFRDYVDRFYKTLRAEQASQEVKNWMTETLLVQNANPDCKTILKALGPAATLEEMMTACQGVGGPGHKARVLAEAMSQVTNSATIMMQKGNFRNQKKMVKCFNCGKEGHIARNCRAPRKKGCWKCGREGHQMKDCTERQANFLGKIWPSHKGRPGNFLQSRPEPTAPPEESFRFGEETTTPSQKQEPIDKEMYPLASLKSLFGNDPSSQ

SEQ ID NO: 275 - protein, 498 aa, Human immunodeficiency virus
MGARASVLSGGKLDRWEKIRLRPGGKKQYKLKHIVWASRELERFALNPGLLETSEGCRQILRQLQPSLQTGSEELKSLFNTVATLYCVHQNIDVRDTKEALDKIEEEQNKSKKKAQQAAADTGDSSKVSQNYPIVQNLQGQMVHQAISPRTLNAWVKVIEEKAFSPEIIPMFSALSEGATPQDLNTMLNTVGGHQAAMQMLKETINEEAADWDRLHPVQAGPVAPGQIRDPRGSDIAGTTSTLQEQIAWMTNNPPIPVGEIYKRWIILGLNKIVRMYSPVSILDIKQGPKEPFRDYVDRFYKTLRAEQATQEVKNWMTETLLVQNANPDCKTILKALGQGATLEEMMTACQGVGGPGHKARVLAEAMSQVTNSANIMMQRGNFKNQRRIIKCFNCGKEGHISKNCRAPRKKGCWKCGKEGHQMKDCTERQANFLGKIWPSHKGRPGNFLQSRPEPTAPPEESFREETTTLSQKQEPIDKEMYPLASLKSLFGNDPLSQ

SEQ ID NO: 276 - protein, 500 aa, Human immunodeficiency virus
MGARASVLRGEKLDDWERIRLRPGGNKKYQLRHIVWASRELERFALNPGLLETAAGCRQIITQLQPSIQTGSEEIKSLYNTVATLYCVHERIKVADTKEALDRIEEEQAKSKKKAQQATADAKDSSQVSQNYPIVQNLQGQMVHQAISPRTLNAWVKVIEEKAFSPEVIPMFSALSEGATPQDLNTMLNTVGGHQAAMQMLKETINEEAAEWDRLHPAQAGPVAPGQIRDPRGSDIAGTTSTLQEQITWMTNNPPIPVGEIYKRWIILGLNKIVRMYSPVSILDIRQGPKEPFRDYVDRFYKTLRAEQASQDVKNWMTETLLVQNANPDCKTILKAMGPGASLEEMMTACQGVGGPGHKARVLAEAMSQVTNTGAAMMMQRGNFKGPKRIIKCFNCGKEGHIAKNCRAPRKKGCWKCGKEGHQMKECTERQANFLGRIWPSHKGRPGNFLQNRLEPTAPPAESFGFGEEIVPSQKQEQKDKELYPLTSLKSLFGNDPMSQ

SEQ ID NO: 277 - protein, 503 aa, Human immunodeficiency virus
MGARASVLSGGELDRWEKIRLRPGGKKKYKLKHIVWASRELERFAVNPGLLETSEGCRKILGQLQPSLQTGSEELKSLFNTVATLYCVHQKIDVKDTKEALEKVEEEQNKSKKKAQQEAAADTRNRSQVSQNFPIVQNLQGQMVHQPISPRTLNAWVKVVEEKAFSPEVIPMFSALSEGATPQDLNVMLNTVGGHQAAMQMLKETINDEIADWDRLHPVQAGPHPAGQLREPRGTDIAGTTSTLQEQIAWMTHNPPIPVGEIYKRWIILGLNKIVRMYSPVSILDIRQGPKEPFRDYVDRFYKVLRAEQASQDVKNWMTETLLVQNANPDCKSILKALGPAASLEEMMTACQGVGGPSHKARVLAEAMSQANSNTIMMQRGNFKNQRRTVKCFNCGKEGHIAKNCRAPRKKGCWKCGKEGHQMKDCTERQANFLGKIWPSHKGRPGNFLQSRPEPTAPPAPPEESFRFGEETTTPSQKQEPRDKELYPLASLRSLFGNDPSSQ

SEQ ID NO: 278 - protein, 499 aa, Human immunodeficiency virus
MGARASILSGGKLDHWEKIRLRPGGRKKYRLKHIVWASRELERFAVNPGLLETSDGCRQILGQLHPSLQTGSEELRSLYNTIAVLYCVHQRIEIKDTKEALEKIEEEQNKSKKKAQPVAADTGSNSKVSQNYPIVQNLQGQMVHQAISPRTLNAWVKVIEEKAFSPEVIPMFSALSEGATPQDLNTMLNTVGGHQAAMQMLKETINEEAAEWDRLHPVHAGPIAPGQMREPRGSDIAGTTSTLQEQIGWMTNNPPIPVGEIYKRWIILGLNKIVRMYSPVSILDIRQGPKEPFRDYVDRFYKTLRAEQATQEVKNWMTETLLVQNANPDCKTILKALGPAATLEEMMTACQGVGGPGHKARVLAEAMSQVNSNNIMMQRGNFRDQRKKVKCFNCGKEGHIAKNCRAPRKKGCWKCGKEGHQMKDCTERQANFLGKIWPSHKGRPGNFLQSRPEPTAPPEESFRFGEETTNPPQKQEPIDKELYPSISLKSLFGNDPSSQ

SEQ ID NO: 279 - protein, 502 aa, Human immunodeficiency virus
MGARASVLSGGKLDKWEKIRLRPGGKKRYKLKHIVWASRELERFAVNPGLLETSEGCRQILAQLQPALQTGTEELRSLFNTVATLYCVHQKIEVKDTKEALEKVEEEQNKSKKKAQQTAAAADTGESSKVSQNYPIVQNLQGQMVHQALSPRTLNAWVKVIEERAFSPEVIPMFTALSEGATPQDLNTMLNTVGGHQAAMQMLKETINEEAAEWDRLHPVHAGPVAPGQMREPRGSDIAGTTSNLQEQIGWMTSNPPIPVGEIYKRWIILGLNKIVRMYSPTSILDIRQGPKEPFRDYVDRFYKTLRAEQASQDVKNWMTETLLVQNANPDCKTILKALGPAATLEEMMTACQGVGGPGHKARVLAEAMSQVTNSANIMMQRGNFRNQRKAVKCFNCGKEGHIARNCRAPRKKGCWKCGKEGHQMKDCTERQANFLGKIWPSHKGRPGNFLQSRPEPTAPPEESFRFGEETTTPSQKQEPIDKEMYPLTSLRSLFGNDPSSQ

SEQ ID NO: 280 - protein, 500 aa, Human immunodeficiency virus
MGARASVLSGGELDKWEKIRLRPGGKKRYKLKHIVWASRELERFAVNPGLLETAEGCRQILGQLQPALQTGSEELKSLWNTVATLYCVHQKIDVKDTKEAVDKIEEEQNKSKKKAAQQAAAGTGNSSQVSQNYPIVQNIQGQMVHQAISPRTLNAWVKVIEEKAFSPEVIPMFSALSEGATPQDLNTMLNTVGGHQAAMQMLKETINEEAAEWDRLHPVHAGPIAPGQMREPRGSDIAGTTSTLQEQIGWMTNNPPIPVGEIYKRWIILGLNKIVRMYSPISILDIKQGPKEPFRDYVDRFYKTLRAEQCTQEVKNWMTETLLVQNSNPDCKTILKALGPAATLEEMMTACQGVGGPGHKARVLAEAMSQVNSTTIMMQRGNFKNQRKNIKCFNCGKEGHLARNCRAPRKRGCWKCGEEGHQMKDCTGRQANFLGKIWPSHKGRPGNFLQSRPEPTAPPAESFRFGEETTTPSQKQEPTDKEMYPLASLKSLFGNDPSSQ

SEQ ID NO: 281 - protein, 500 aa, Human immunodeficiency virus
MGARASVLSGGELDRWEKIRLRPGGKKKYKLKHIVWASRELERFAVNPGLLETSAGCRQILEQLQPALQTGSEELKSLHNAVAVLYCVHQRIDVKDTKEALDKIEEERNKSKKKEQQATADTGNSNQVSQNYPIVQNLQGQMVHQTMSPRTLNAWVKVIEEKAFSPEVIPMFSALSEGATPQDLNTMLNTVGGHQAAMQMLKETINEEAAEWDRLHPVQAGPVAPGQLREPRGSDIAGTTSTLQEQIAWMTHNPPIPVGEIYKRWIILGLNKIVRMYSPTSILDIRQGPKEPFRDYVDRFYKTLRAEQASQEVKNWMTETLLIQNANPDCKTILKALGPGATLEEMMTACQGVGGPSHKARVLAEAMSQATGSATIMMQRGNFKNQRKIIKCFNCGKEGHIAKNCRAPRKKGCWKCGKEGHQMKDCTERQANFLGKIWPSHKGRPGNFLQSRPEPTAPPEENFRFGEETTTPSQKQEPTDKEQYPLAALRSLFGNDPSSQ

SEQ ID NO: 282 - protein, 506 aa, Human immunodeficiency virus
MGARASVLSGGQLDRWERIRLRPGGKKKYRLKHLVWASRELERFALNPGLLETSEGCRQILGQLQPSLQTGSEEIKSLFNTVATLYCVHQKIDVKDTKEALDKIEEEQNKSKKKTQQAAADTGNSSQVSQNYPIVQNLQGQMVHQAISPRTLNAWVKVIEEKAFSPEVIPMFSALSEGATPQDLNTMLNTVGGHQAAMQMLKETINEEAAEWDRLHPVHAGPIAPGQMREPRGSDIAGTTSTLQEQIGWMTNNPPIPVGEIYKRWIILGLNKIVRMYSPVSILDIRQGPKEPFRDYVDRFYKTLRAEQASQEVKNWMTETLLVQNANPDCKTILKALGPAATLEEMMTACQGVGGPGHKARVLAEAMSQMTNSATIMMQKGNFRNQRKIVKCFNCGKEGHIARNCRAPRKKGCWKCGKEGHQMKDCNERQANFLGKIWPSSKGRPGNFPQSRLAPQSRLEPTAPPEESFRIGEETATPSQKQEQIDREMPPLTSLRSLFGNDPSSQ

SEQ ID NO: 283 - protein, 499 aa, Human immunodeficiency virus
MGARASVLSGGELDRWEKIRLRPGGKKKYKLKHIVWASRELERFAVNPGLLETSEGCRQIIGQLQPSLQTGSEELRSLYNTVATLYCVHQRIEIKDTKEALDKIEEEQNKSKKKAQQAAADTGNSSQVSQNYPIVQNMQGQMVHQAISPRTLNAWVKVVEEKAFSPEVIPMFSALSEGATPQDLNTMLNTVGGHQAAMQMLKETINEEAAEWDRLHPPQAGPIAPGQIREPRGSDIAGTTSTLQEQITWMTNNPPIPVGEIYKRWIILGLNKIVRMYSPTSILDIRQGPKEPFRDYVDRFYKTLRAEQATQEVKNWMTETLLVQNANPDCKTILKALGPAATLEEMMTACQGVGGPGHKARVLAEAMSQASQATIMMQRGNFRNQRRTVKCFNCGKEGHIAKNCRAPRKKGCWKCGKEGHQMKDCTERQANFLGKIWPSHRGRPGNFLQNRPEPSAPPEESFRFGEETTTPSQKQEPIDKELYPLTSLKSLFGNDPLSQ

SEQ ID NO: 284 - protein, 500 aa, Human immunodeficiency virus
MGARASVLSGGKLDKWEKIRLRPGGKKKYQLKHLVWASRELERYALNPGLLETSEGCRQILRQLQPALQTGTEEIKSLYNAVATLYCVHQGIDVRDTKEALDKIEEEQNKSKKETQQAAADTENNSKVSQNYPIVQNLQGQMVHQPISPRTLNAWVKVVEEKAFSPEVIPMFSALSEGATPQDLNTMLNTVGGHQAAMQMLKETINEEAAEWDRLHPVQAGPVAPGQMREPRGSDIAGTTSNLQEQVAWMTGNPAIPVGEIYKRWIILGLNKIVRMYSPTSILDIRQGPKEPFRDYVDRFYRTLRAEQASQDVKNWMTETLLVQNANPDCKTILKALGPGATLEEMMTACQGVGGPSHKARVLAEAMSQVNSANANVMMQRSNFKNQRRIVKCFNCGKEGHIAKNCRAPRKKGCWKCGKEGHQMKDCTERQANFLGKIWPSHKGRPGNFPQSRTEPTAPPEEIFGFGEEATPSQKQESIDKEKYPLSSLRSLFGNDPSSQ

SEQ ID NO: 285 - protein, 506 aa, Human immunodeficiency virus
MGARASILSGGGLDRWEKIRLRPGGKKKYRLKHLVWASRELERFAVNPGLLETAEGCKQILEQLQPSLKTGSEEIKSLYNTVATLYCVHNKIEVRDTKEALDKIEEEQNKSKKKAQQAAADTGNSSHTGDNSQVSHNYPIVQNMQGQMVHQAISPRTLNAWVKVVEEKAFSPEVIPMFSALSEGATPQDLNTMLNTVGGHQAAMQMLKETINEEAAEWDRVHPVHAGPIAPGQMREPRGSDIAGTTSTLQEQIGWMTNNPPIPVGEIYKRWIILGLNKIVRMYSPTSILDIKQGPKEPFRDYVDRFYKVLRAEQASQEVKNWMTETLLVQNSNPDCKTILKALGPGATLEEMMTACQGVGGPAHKARVLAEAMSQATNAAAIMMQKGNYGNQKKIVKCFNCGKIGHIAKHCKAPRKRGCWKCGKEGHQMKDCTERQANFLGKIWPSYKGRPGNFLQNRPEPSAPPEESFKFGEETTTPPQKQEPIDKELYPLASLKSLFGNDPLSQ

SEQ ID NO: 286 - protein, 501 aa, Human immunodeficiency virus
MGARASILRGGELDRWEKIRLRPGGKKKYRLKHLVWASRELERFAVNPGLLESSEGCRKILEQLQPSLQTGSEELRSLYNTIATLYCVHQKIEIRDTKEALDKIEEEQNKSKKKAQQAAADTGNKSQVSQNYPIVQNLQGQMVHQALSPRTLNAWVKVIEEKAFSPEVIPMFSALSEGATPQDLNTMLNTVGGHQAAMQILKETINEEAADWDRTHPVHAGPVAPGQMREPRGSDIAGTTSTLQEQIGWMTNNPPIPVGEIYKRWIILGLNKIVRMYSPTSILDIRQGPKEPFRDYVDRFYKTLRAEQASQEVKNWMTETLLVQNANPDCKTILKALGPGATLEDMMTACQGVGGPSHKARVLAEAMSQVTNSATNVMMQRGNFRSQRRTVKCFNCGKEGHIAKNCRAPRKKGCWKCGKEGHQMKDCTERQANFLGKIWPSHKERPGNFLQSRPEPSAPPAESFRFGEETATPPQKQEPIDQELYPLASLKSLFGNDPSSQ

SEQ ID NO: 287 - protein, 503 aa, Human immunodeficiency virus
MGARASVLSGGELDRWEKIRLRPGGKKKYKLKHIVWASRELERYSLNPGLLETSEGCRQILGQLQPALQTGSEELRSLFNTIATLYCVHQRIDVKDTKEALDKIEEEQNKSKKKAQQATAADTGNSSQVSQNYPIVQNIQGQMVHQAISPRTLNAWVKVVEEKAFSPEVIPMFSALSEGATPQDLNTMLNTVGGHQAAMQMLKETINEEAAEWDRLHPVHAGPIAPGQMREPRGSDIAGTTSTLQEQIGWMTNNPPIPVGEIYKRWIILGLNKIVRMYSPISILDIKQGPKEPFRDYVDRFYKTLRAEQASQDVKNWMTETLLVQNANPDCKTILKALGPAATLEEMMTACQGVGGPGHKARILAEAMSQVTNSNVIMMQRGNFRNQRKTIKCFNCGKEGHLARNCRAPRKKGCWKCGKEGHQMKECTERQANFLGKIWPSHKGRPGNFLQSRPEPTAPPEESFRFGEETTTTPSQKQEPVDKELYPPLASLRSLFGNDPSSQ

SEQ ID NO: 288 - protein, 501 aa, Human immunodeficiency virus
MGARASVLSGGELDRWEKIRLRPGGHKKYRLKHIVWASRELERFAINPGLLETSEGCKQILGQLQPSLQTGSEELRSLFNTIATLYCVHQKIEIKDTKEALEKIEEEQNKCKKKAQQAAADTQKSSQVSQNFPIVQNLQGQMVHQAISPRTLNAWVKVIEEKAFSPEVIPMFTALSEGATPQDLNTMLNTVGGHQAAMQMLKETINEEAAEWDRLHPVHAGPVAPGQMREPRGSDIAGTTSTLQEQIAWMTSNPPVPVGEIYKRWIILGLNKIVRMYSPTSILDIKQGPKEPFRDYVDRFYKTLRAEQASQEVKNWMTETLLVQNANPDCKTILKALGPGATLEEMMTACQGVGGPGHKARVLAEAMSQVTNSSAIMMQRGNFRGQRKIVKCFNCGKEGHIAKNCRAPRKKGCWKCGKEGHQMKDCTERQANFLGKIWPSHKGGRPGNFLQSRPEPTAPPEESFRYGEGTIAPPQKQEQIDKELYPLTSLRSLFGNDPSSQ

SEQ ID NO: 289 - protein, 503 aa, Human immunodeficiency virus
MGARASVLSGGELDRWERIRLRPGGKKKYRLKHIVWASRELERFAVNPGLLETSEGCRQILGQLQPSLQTGSEELRSLFNTIATLYCVHQKIDVKDTKEALDKIEEEQNKSKKKAQQAAAAAADTGNSSQVSQNYPIVQNIQGQMVHQAISPRTLNAWVKVVEEKAFSPEVIPMFSALSEGATPQDLNTMLNTVGGHQAAMQMLKETINEEAAEWDRLHPVHAGPVAPGQMREPRGSDIAGTTSTLQEQIGWMTNNPPIPVGEIYKRWIIMGLNKIVRMYSPTSILDIKQGPKEPFRDYVDRFYKTLRAEQASQEVKNWMTETLLVQNANPDCKTILKALGPAATLEEMMTACQGVGGPGHKARVLAEAMSQVTNSATIMMQKGNFRNQRKIVKCFNCGKEGHIARNCRAPRKKGCWKCGREGHQMKDCTERQANFLGKIWPSHKGRPGNFLQSRPEPTAPPEESFRFGEETATPSQKQEPTDKELYPLVSLKSLFGNDPSSQ

SEQ ID NO: 290 - protein, 500 aa, Human immunodeficiency virus
MGARASVLSGGKLDKWEKIRLRPGGKKKYKLKHIVWASRELERFAVNPGLLETAEGCKQIMEQLQPALQTGTEELRSLFNTIATLYCVHQRIEIKDTKEALEKVEEEQNKSKKKAQQPAADTGSSSQVSQNYPIVQNLQGQMVHQAISPRTLNAWVKVVEEKAFSPEVIPMFSALSEGATPQDLNTMLNTVGGHQAAMQMLKETINEEAAEWDRLHPVHAGPIAPGQMREPRGSDIAGTTSTLQEQIGWMTHNPPIPVGEIYKRWIILGLNKIVKMYSPTSILDIRQGPKEPFRDYVDRFYRTLRAEQASQEVKNWMTETLLVQNANPDCKTILKALGPAATLEEMMTACQGVGGPGHKARVLAEAMSQVTNSAAVMMQKGNFKNQRKAVKCFNCGKEGHIARNCRAPRKKGCWKCGREGHQMKECTERQANFLGKIWPSHKGRPGNFLQSRPEPTAPPVESFRFGEETTAPPQKQEPTDKELHPLASLRSLFGNDPSSQ

SEQ ID NO: 291 - protein, 507 aa, Human immunodeficiency virus
MGARASVLSGGKLDKWEKIRLRPGGKKRYKLKHIVWASRELERFAVNPGLLESAGGCRQILEQLQPSLQTASEELRSLYNMVATLYCVHQQIEVRDTKEALDKIEEEQNKSKKKAQQTAADTGNSSQVSQNYPIVQNLQGQMVHQAISPRTLNAWVKVVEEKAFSPEVIPMFSALSEGATPQDLNTMLNTVGGHQAAMQMLKETINEEAAEWDRLHPVHAGPIAPGQMRKPRGSDIAGTTSTLQEQIAWMTNNPPIPVGEIYKRWIIMGLNKVVRMYSPTSILDIRQGPKEPFRDYVDRFYKTLRAEQASQEVKNWMTETLLVQNSNPDCKTILKALGPAATLEEMMTACQGVGGPGHKARVLAEAMSQANSASIMMQKGNFKNQGKIVKCFNCGKAGHIARNCRAPRKKGCWKCGKEGHQMKDCSNERQANFLGKIWPSHKGRPGNFLQNRPEPSAPPEPSAPPEESFRFGEGTTTPSQKQETTDKDLYPPLASLKSLFGNDPSSQ

SEQ ID NO: 292 - protein, 496 aa, Human immunodeficiency virus
MGARASIISGGKLDKWEKIRLRPGGRKKYKLKHIIWASRELERYALNPGLLETSEGCKQIIGQLQPALQTGSEEFRSLYNTIAVLYCVHQRIEVKDTKEALDKIEEEQNKSKKRAQQAAADTGNSPVSQNYPIVQNLQGQMVHQAISPRTLNAWVKVVEEKAFSPEVIPMFSALSEGATPQDLNTMLNTVGGHQAAMQMLKETINEEAAEWDRLHPPQAGPHPPGQLREPRGSDIAGTTSTLQEQIGWMTNNPPIPVGEIYKRWIILGLNKIVRMYSPTSILDIRQGPKEPFRDYVDRFYKTLRAEQASQEVKNWMTETLLVQNANPDCKTILKALGPAATLEEMMTACQGVGGPGHKARVLAEAMSQVTTPPAIMMQRGNFRNQGKTVKCFNCGKVGHIAKNCRAPRKKGCWKCGKEGHQMRDCIEGQANFLGKIWPSHKGRPGNFLQSRPEPSAPPEESFRFGEETATPPQKQESIDKEKYPLASLKSLFGNDP

SEQ ID NO: 293 - protein, 506 aa, Human immunodeficiency virus
MGARASVLSGGELDKWEKIRLRPGGKKKYKLKHIVWASRELERFAVNPGLLETSQGCRQILGQLQPSLQTGSEELKSLFNTIAVLYCVHQRIEVKDTKEALDKIEEEQNKSKKKAQPAAAAADTGNNSNVSQNYPIVQNLQGQMIHQAISPRTLNAWVKVVEEKAFSPEVIPMFSALAEGATPGDLNLMLNAVGGHQAAMQMLKETINEEAADWDRQHPVQAGPVAPGQIREPRGSDIAGTTSTLQEQIAWMTANPPIPVGEIYKRWIILGLNKIVRMYSPTSILDIRQGPKEPFRDYVDRFYKTLRAEQASQDVKNWMTETLLVQNANPDCKTILKALGPGATLEEMMTACQGVGGPGHKARVLAEAMSQVTNSTAIMMQRGNFRNQRKSIKCFNCGKEGHLARNCRAPRKKGCWKCGKEGHQMKDCTERQANFLGKIWPSHKGRPGNFLQSRPEPTAPPAPTAPPEESFRFVEETTTPSPKQEQRDKELYPPLASLRSLFGSDP

SEQ ID NO: 294 - protein, 503 aa, Human immunodeficiency virus
MGARASVLSGGELDRWEKIRLRPGGRKKYRLKHIVWASRELERFAVNPGLLETSEGCRQILGQLQPSLQTGSEELRSLYNTIATLYCVHQKIDVKDTKEALEKIEEEQNKSKKRAQQAAAAAADTGNSSQVSHNYPIVQNMQGQMVHQPISPRTFKAWVKVIEENVFLFGLIPMFTALSEGATPQDLNTMLNTVGGHQAAMQMLKETINEEAAEWDRLHPAQAGPIAPGQIREPRGSDIAGTTSTLQEQITWMTNNPPIPVGEIYKRWIILGLNKIVRMYSPTSILDIKQGPKEPFRDYVDRFYKTLRAEQASQEVKNWMTETLLVQNANPDCKTILKALGPAATLEEMMTACQGVGGPGHKARVLAEAMSQVTNSAAIMMQKGNFRNQRRSVKCFNCGKEGHIAKNCRAPRKKGCWKCGKEGHQMKDCTERQANFLGKIWPSHKGRPGNFLQSRPEPTAPPEESFRFGEETTTPPQKQEPIDKELYPLASLKSLFGNDPSSQ

SEQ ID NO: 295 - protein, 502 aa, Human immunodeficiency virus
MGARASVLSGGELDRWEKIRLRPGGKKQYKLKHIVWASRELERFALNPSLLETAEGCKQILGQLQPSLQTGSEELKSLHNTVAVLYCVHQRIAIKDTKEALDKIEEEQNKCKKKAQQAQQAAADTGNSSQVSQNYPIVRNLQGQMVHQAISPRTLNAWVKVVEEKAFSPEVIPMFSALSEGATPQDLNTMLNTVGGHQAAMQMLKETINEEAAEWDRLHPVHAGPIAPGQMREPRGSDIAGTTSTLQEQIGWMTSNPPIPVGDIYKQWIIMGLNKIVRMYSPTSILDIKQGPKEPFRDYVDRFYKTLRAEQASQEVKNWMTETLLVQNSNPDCKTILKALGPAATLEEMMTACQGVGGPGHKARVLAEAMSQVTNAATIMMQKGNFRGQRKPVKCFNCGKEGHIARNCRAPRKRGCWKCGKEGHQMKDCTERQANFLGKIWPSHKGRPGNFLQNRPEPSAPPAESFRFGEETAAPSQKQEQIDKELYPTTSLRSLFGNDPSL

SEQ ID NO: 296 - protein, 499 aa, Human immunodeficiency virus
MGARASVLSGGELDKWEKIRLRPGGKKKYKLKHIVWASRELERFAVNPGLLETSQGCRQILGQLQPSLQTGSEELKSLYNTVAVLYCVHQRIEVKDTKEALEKIEEEQNKSKKKAQPAAAAADTGNNSNVSQNYPIVQNLQGQMVHQAISPRTLNAWVKVVEEKAFSPEVIPMFSALAEGATPGDLNLMLNTVGGHQAAMQMLKETINEEAADWDRQHPVHAGPIAPGQMREPRGSDIAGTTSTLQEQVAWMTANPPIPVGEIYKRWIILGLNKIVRMYSPTSILDIRQGPKEPFRDYVDRFYKTLRAEQASQDVKNWMTETLLVQNANPDCKTILKALGPGATLEEMMTACQGVGGPGHKARVLAEAMSQITNPTAIMMQRGNFKNQRKIIKCFNCGKEGHIAKNCRAPRKKGCWKCGKEGHQMKDCIERQANFLGKIWPSHKGRPGNFLQSRPEPTAPPEESFRFVEETTTPPQKQEPTDKELYPLASLKSLFGNDP

SEQ ID NO: 297 - protein, 508 aa, Human immunodeficiency virus
MGARASVLSGGDLDRWEKIRLRPGGKKRYQLKHIVWASRELERFAVNPGLLETSNGCRQILAQLQSSLQTGSEELKSLYNTVATLYCVHQKIDIKDTKEALDKIEEEQNKSKKKAQQAAAAAADTGNNSQISQNYPIVQNMQGQMVHQAISPRTLNAWVKVVEEKAFSPEVIPMFTALSEGATPQDLNTMLNTVGGHQAAMQMLKETINEEAAEWDRLHPVHAGPVAPGQMREPRGSDIAGTTSTLQEQVAWMTGNPGVPVGDIYKRWIIMGLNKIVRMYSPTSILDIKQGPKEPFRDYVDRFYKTLRAEQASQDVKNWMTETLLVQNANPDCKTILKAMGPGATLEEMMTACQGVGGPGHKARVLAEAMSQVNSNAIMMQRGNFRGQRRTVKCFNCGKEGHIAKNCRAPRKKGCWKCGKEGHQMKDCTNERQANFLGKIWPSHKGRPGNFLQSRPGPTALEPTAPPEESIRFGEGTTTSSQKQEPRDKELYPLTSLKSLFGNDPSSQ

SEQ ID NO: 298 - protein, 510 aa, Human immunodeficiency virus
MGARASVLSGGKLDKWEKIRLRPGGKKKYQLKHIVWASRELERFAVNPGLLETSEGCRQILGQLQPSLQTGSEELKSLFNTIATLYCVHQGIEIRDTKEALDKIEEEQNKSKKEAQQAAAATGNNSQVSQNYPIVQNLQGQMVHQAISPRTLNAWVKVIEEKAFSPEVIPMFSALAEGATPQDLNTMLNTVGGHQAAMQMLKETINEEAAEWDRLHPVHAGPIAPGQMREPRGSDIAGTTSTLQEQIGWMTNNPPIPVGEIYKRWIIMGLNKIVRMYSPVSILDIRQGPKEPFRDYVDRFYKTLRAEQASADVKNWMTETLLVQNANPDCKTILKALGPAATLEEMMTACQGVGGPSHKARVLAEAMSLATNPAAIMMQKGNFKSPRKGVKCFNCGKEGHIAKNCRAPRKRGCWKCGKEGHQMKDCTERQANFLGKIWPSYKGRPGNFLQSRPEPTAPPEESLRPTAPPAESLRFGEETTTPSQKQGTIDKELYPLTSLRSLFGNDPSSQ

SEQ ID NO: 299 - protein, 501 aa, Human immunodeficiency virus
MGARASVLSGGELDKWEKIRLRPGGRKQYKLKHIVWASRELERFALNPGLLETSEGCRQILGQLQPSLQTGSEELRSLFNTIAVLYCVHQRIEVKDTKEALEKIEEEQNKSKKKAQQAAADIGKNNQVSQNYPIVQNLQGQMVHQAISPRTLNAWVKVIEEKAFSPEVIPMFSALSEGATPQDLNTMLNTVGGHQAAMQMLKETINEEAAEWDRLHPVHAGPVAPGQMREPRGSDIAGTTSTLQEQIGWMTNNPPIPVGEIYKRWIILGLNKIVRMYSPVSILDIRQGPKEPFRDYVDRFYKTLRAEQASQDVKNWMTETLLVQNANPDCKTILKALGPAATLEEMMTACQGVGGPSHKARVLAEAMSQATNTAASIMMQRGNPKTQRKIVKCFNCGKIGHIARNCRAPRKRGCWKCGKEGHQMKDCNEGQANFLGKIWPSHKGRPGNFLQSRPEPTAPPEESFRFGEETATPSQKQEPKDKELYPLASLRSLFGNDPSSQ

SEQ ID NO: 300 - protein, 506 aa, Human immunodeficiency virus
MGARASVLSGGQLDKWEKIRLRPGGKKAYKLKHIVWASRELERFAVNPGLLETAEGCRQILEQLQPALKTGSEELRSLFNTVAVLYCVHQRIDVKDTKEALDKIEEEQNKSKKKAQQAQPAAADTGNNNQVSQNYPIVQNAQGQMVHQGISPRTLNAWVKVIEEKAFSPEVIPMFSALSEGATPQDLNTMLNTVGGHQAAMQMLKDTINEEAADWDRMHPVHAGPIAPGQMREPRGSDIAGTTSTLQEQIQWMTNNPPIPVGEIYKRWIIIGLNKIVRMYSPVSILDIKQGPKEPFRDYVDRFYKTLRAEQASQEVKNWMTETLLVQNANPDCKSILKALGPAATLEEMMTACQGVGGPSHKARVLAEAMSQVTNSAAIMMQNSNFKNQRKIVKCFNCGKEGHIARNCRAPRKKGCWKCGREGHQMKDCTERQANFLGKIWPSHKGRPGNFLQNRPEPTAPPAPPEESFRFGEETAAPSQQQGTMDKDLYPLASLKSLFGNDPSSQ

SEQ ID NO: 301 - protein, 506 aa, Human immunodeficiency virus
MGARASVLSGGELDKWERIRLRPGGKKKYRLKHIVWASRELERFAVNPGLLETSEGCRQILGQLQPSLQTGSEELRSLYNTIATLYCVHQRIDVKDTKEALEKIEEEQNKSKKKAQQAAAAADTGTGNNSKVSQNFPIVQNLQGQMVHQAISPRTLNAWVKVVEEKAFSPEVIPMFSALSEGATPQDLNTMLNTVGGHQAAMQMLKETINEEAAEWDRLHPVHAGPIAPGQMREPRGSDIAGTTSTLQEQIGWMTNNPPIPVGEIYKRWIILGLNKIVRMYSPTGILDIRQGPKESFRDYVDRFYKTLRAEQASQEVKNWMTETLLVQNANPDCKTILKALGPAATLEEMMTACQGVGGPGHKARVLAEAMSHVTNPVNIMMQRGSFRNQRRMVKCFNCGKEGHIAKNCRAPRKKGCWKCGKEGHQMKDCNERQVNFLGKIWPSHKGRPGNFLQNRPEPSAPPAESLGFGEEATTPPQKQETMTVDKELYPLTSLRSLFGSDPSSQ

SEQ ID NO: 302 - protein, 501 aa, Human immunodeficiency virus
MGARASILSGGKLDKWEKIRLRPGGKKQYKLKHLVWASRELERFAVNPGLLETSEGCRQILGQLHPSLQTGSEELKSLYNTVATLYCVHQNIEVRDTKEALDKIEEEQNKSKKKAQQAAAADTGNSGQVSQNYPIVQNIQGQMVHQALSPRTLNAWVKVVEEKAFSPEVIPMFAALSEGATPGDLNTMLNTVGGHQAAMQMLKETINEEAAEWDRTHPVHAGPVAPGQLREPRGSDIAGTTSTLQEQIAWMTHNPPIPVGEIYKKWIILGLNKIVRMYSPSSILDIKQGPKEPFRDYVDRFYKTLRAEQASQEVKNWMTETLLVQNANPDCKTILKALGPAATLEEMMTACQGVGGPGHKARVLAEAMSQLTNSATIMMQKGNFRNQKRTIKCFNCGKEGHLARNCRAPRKKGCWKCGKEGHQMKDCIERQANFLGRIWPSHKGRPGNFLQSRPEPSAPPAESFGFGEETTTPSQKQELIDKEQYPLTSLRSLFGNDPSSM

SEQ ID NO: 303 - protein, 502 aa, Human immunodeficiency virus
MGARASVLSGGELDQWEKIRLRPGGKKKYKLKHIVWASRELERFAVNPGLLETSEGCRQILEQLQPALQTGSEELRSLFNTVATLYCVHKRIEVKDTKEALEKIEEEQNKSKKKAQQAAVAADAGTSNQVSQNYPIVQNIQGQMVHQALSPRTLNAWVKVVEEKAFSPEVIPMFSALSEGATPQDLNTMLNTVGGHQAAMQMLKETINEEAAEWDRLHPVHAGPIAPGQMREPRGSDIAGTTSTLQEQIAWMTNNPPIPVGEIYKRWIIMGLNKIVRMYSPTSILDIKQGPKEPFRDYVDRFYKTLRAEQASQEVKNWMTETLLVQNANPDCKTILKALGPGATLEEMMTACQGVGGPSHKARVLAEAMSQVTNSATIMMQTGKFRNQRKTVKCFNCGKEGHIARNCRAPRKRGCWKCGKEGHQMKDCTERQANFLGKIWPSHKGRPGNFLQSRPEPTAPPEESFRFGEEITTPSQKQELTDKEMYPLTSLRSLFGNDPSSQ

SEQ ID NO: 304 - protein, 501 aa, Human immunodeficiency virus
MGARASVLSGGKLDKWEKIRLRPRGKKRYKLKHIVWASRELERFAVNPSLLETAEGCRQILGQLQPALQTGSEELKSLYNAVATLYCVHQNIEVRDTKEALDKIEEEQNKSKKKAQQAAADTGNGSQVSQNYPIVQNLQGQMVHQAISPRTLNAWVKVVEEKAFSPEVIPMFSALSEGATPQDLNTMLNTVGGHQAAMQMLKETINEEAAEWDRLHPVHAGPIAPGQMREPRGSDIAGTTSTLQEQIGWMTNNPPIPVGEIYKRWIILGLNKIVRMYSPISILDIRQGPKEPFRDYVDRFYKTLRAEQASQDVKNWMTETFLVQNANPDCKTILKALGPAATLEEMMTACQGVGGPSHKARILAEAMSQVTNSATIMLQKGNFRDQRKIVKCFNCGKVGHIAKNCRAPRKKGCWKCGKEGHQMKDCTNEGRQANFLGKIWPSHKGRPGNFLQSRPEPTAPPEESFRFGEETTPSQKQEKIDKELYPLASLKSLFGNDPSSQ

SEQ ID NO: 305 - protein, 506 aa, Human immunodeficiency virus
MGARASVLSGGELDRWENIRLRPGGKKKYKLKHVVWASRELERFAVNPGLLETSEGCRQILGQLQPSLQTGSEELKSLYNTVATLYCVHQKIEIKDTKEALEKIEEEQNKSKKKAQQAAADTGNRGNSSQVSQNYPIVQNIEGQMVHQAISPRTLNAWVKVVEEKAFSPEVIPMFSALSEGATPQDLNTMLNTVGGHQAAMQMLKETINEEAAEWDRLHPVHAGPITPGQMREPRGSDIAGTTSTLQEQIGWMTNNPPIPVGEIYKRWIILGLNKIVRMYSPSSILDIRQGPKEPFRDYVDRFYKTLRAEQASQEVKNRTTETLLVQNANPDCKTILKALGPAATLEEMMTACQGVGGPGHKARVLAEAMSQVTNSATIMMQRGNFRNQRKIIKCFNCGKEGHIAKNCRAPRKRGCWKCGKEGHQMKDCTERQANFLGKIWPSCKGRRNFPQSRTEPTAPPEESFRFGEETTTPYQKQEKKQETIDKDLYPLASLKSLFGNDPLSQ

SEQ ID NO: 306 - protein, 500 aa, Human immunodeficiency virus
MGARASVLSGGELDKWEKIRLRPGGKKQYRLKHIVWASRELERFAVNPGLLETSEGCRQILRQLQPSLQTGSEERRSLFNTVAVLYCVHQRIDVKDTKEALDKIEEEQNKSKKKAQQAAADTGNSSQVSQNYPIVQNLQGQMVHQAISPRTLNAWVKVVEEKAFSPEVIPMFSALSEGATPQDLNTMLNTVGGHQAAMQMLKETINEEAAEWDRLHPVHAGPIAPGQMREPRGSDIAGTTSTLQEQIGWMTHNPPIPVGEIYKRWIILGLNKIVRMYSPTSILDIRQGPKEPFRDYVDRFYKTLRAEQASQEVKNWMTETLLVQNANPDCKTILKALGPAATLEEMMTACQGVGGPGHKARVLAEAMSQVTNPATIMIQRGNFRNQKKTVKCFNCGKEGHIAKNCRAPRKKGCWKCGKEGHQMKDCTERQANFLGKIWPSHKGRPGNFLQSRPEPTAPPEESFRFGEETTTPSQKQEPIDKELYPLASLRSLFGSDPSSQ

SEQ ID NO: 307 - protein, 503 aa, Human immunodeficiency virus
MGARASVLSAGELDKWEKIRLRPGGRKKYKLKHIIWASRELERFAVNPGLLETSEGCRQILGQLQPSLQTGSEELRSLFNTVATLYCVHQKIEVKDTKEALEKVEEEQNKSKKKAQQAAADTGKGSQVSQNYPIVQNLQGQMVHQAISPRTLNAWVKVVEEKAFSPEVIPMFSALSEGATPQDLNTMLNTVGGHQAAMQMLKETINEEAAEWDRLHPVHAGPIAPGQIREPRGSDIAGTTSTLPEQIGWMTHNPPIPVGEIYKRWIILGLNKIVRMYSPTSILDIRQGPKEPFRDYVDRFYKTLRAEQASQEVKNWMTETLLVQNANPDCKTILKALGPAATLEEMMTACQGVGGPGHKARVLAEAMSQVTNPATIMMQRGNFRNQKKPIKCFNCGKEGHLAKNCRAPRKKGCWKCGKEGHQMKDCTERQANFLGKIWPSHKGRPGNFLQSRPEPTAPPAPPEESFRFGEETITPSQKQESIDKELYPLASLKSLFGNDPSSQ

SEQ ID NO: 308 - protein, 500 aa, Human immunodeficiency virus
MGARASVLSGGELDRWEKIRLRPGGKKKYRLKHIVWASRELERFAVNPGLLETSEGCRQILGQLQPALQTGSEELRSLYNTVATLYCVHQRIEIKDTKEALDKIEEEQNKSKKKAQPAAADTGNSTQVSQNYPIVQNMQGQMVHQALSPRTLNAWVKVVEEKAFSPEVIPMFTALSEGATPQDLNTMLNTVGGHQAAMQMLKETINEEAAEWDRLHPVHAGPIAPGQMREPRGSDIAGTTSTLQEQIGWMTHNPPIPVGEIYKRWIIMGLNKIVRMYSPTSILDIRQGPKEPFRDYVDRFYKTLRAEQASQEVKNWMTETLLVQNANPDCKTILKALGPGATLEEMMTACQGVGGPGHKARVLAEAMSQVTSSANIMMQRGNFRNQRKTVKCFNCGKEGHIARNCRAPRKKGCWKCRKEGHQMKDCTERQANFLGKIWPSHKGRPGNFLQSRPEPSAPPEESFRFGEETTTPSQKQEPIDKEMYPLASLRSLFGNDPSSQ

SEQ ID NO: 309 - protein, 503 aa, Human immunodeficiency virus
MGARASVLSGGELDRWEKIRLRPGGKKKYRLKHIVWASRELERFAVNPGLLETSEGCRQILGQLQPSLQTGSEELRSLYNTVATLYCVHQKIEVKDTKEALDKIEEEQNKCKKKAQQAAADTGNSGQVSQNFPIVQNLQGQMVHQAISPRTLNAWVKVIEEKAFSPEVIPMFSALSEGATPQDLNTMLNTVGGHQAAMQMLKEPINEEAARWDRLHPVQAGPVAPGQIRDPRGSDIAGTTSTLQEQIGWMTSNPPIPVGEIYKRWIILGLNKIVRMYSPTSILDIRQGPKEPFRDYVDRFYKTLRAEQASQEVKNWMTETLLVQNANPDCKTILKALGPAATLEEMMTACQGVGGPSHKARILAEAMSQVTNSATIMMQKGNFRNQRKIVKCFNCGKEGHIARNCRAPRKRGCWKCGKEGHQMKDCTERQANFLGKIWPSHKGRPGNFLQSRPEPTAPPAPPEESFRFGEETTTPSQKQELIDKELYPLASLRSLFGNDPSSQ

SEQ ID NO: 310 - protein, 500 aa, Human immunodeficiency virus
MGARASVLSGGELDRWEKIRLRPGGKKQYELKHIVWASRELERFALNPGLLETSEGCRQILGQLQPALQTGSEELRSLYNTVATLYCVHQKIEVRDTKEALDKIEEEQNKSKKKAQQATADIGNSSQVSQNYPIVQNLQGQMVHQAISPRTLNAWVKVVEEKAFSPEVIPMFSALSEGATPQDLNTMLNTVGGHQAAMQMLKETINEEAAEWDRLHPVHAGPVAPGQMRDPRGSDIAGTTSTLQEQIGWMTSNPPIPVGEIYKRWIILGLNKIVRMYSPTSILDIKQGPKEPFRDYVDRFYKTLRAEQATQEVKNWMTETLLVQNANPDCKTILKALGPAATLEEMMTACQGVGGPGHKARVSAEAMSQVTNSATIMMQKGNFRNQKRTVKCFNCGREGHIAKNCRAPRKKGCWKCGKEGHQMKDCTERQANFLGKIWPSHKGRPGNFLQSRPEPTAPPEESFRFGEEIATPSQKQEPIDKELYPLASLKSLFGNDPSSQ

SEQ ID NO: 311 - protein, 498 aa, Human immunodeficiency virus
MGARASVLSGGELDRWEKIRLRPGGKKTYKLKHIVWASRELERFAVNPLETSEGCRQILGQLQPSLQTGSEELRSLYNTVATLYCVHQRIEVKDTKEALDKIEEEQNKGKKKAQQAAADTGNSSTVSQNYPIVQNIQGQMVHQAISPRTLNAWVKVVEEKAFSPEVIPMFSALSEGATPQDLNTMLNTVGGHQAAMQMLKETINEEAAEWDRLHPVHAGPVAPGQMREPRGSDIAGTTSTLQEQIGWMTSNPPIPVGEIYKRWIIMGLNKIVRMYSPTSILDIRQGPKEPFRDYVDRFYKTLRAEQASQDVKNWMTETLLVQNANPDCKTILKALGPAATLEEMMTACQGVGGPSHKARILAEAMSQVTNSATIMMQRGNVRNQRKAVKCFNCGKEGHIARNCRAPRKKGCWKCGKEGHQMKDCIERQANFLGKIWPSYKGRPGNFLQSRPEPSAPPDESFGFGEETTTPPQKQEPIDKEKYPLTSLRSLFGNDPSSQ

SEQ ID NO: 312 - protein, 500 aa, Human immunodeficiency virus
MGARASVLSGGKLDRWEKIRLRPGGKKQYRLKHIVWASRELERFAVNPGLLETAEGCKQILGQLQPALQTGSEELRSLFNTVATLYCVHQGIEVRDTKEALDKIEEEQNKSKKKAQQAAADTGNSSQVSQNYPIVQNMQGQMVHQAISPRTLNAWVKVVEEKAFSPEVIPMFSALSEGATPQDLNTMLNTVGGHQAAMQMLKETINEEAAEWDRLHPVHAGPIAPGQMREPRGSDIAGTTSTLQEQIGWMTNNPPIPVGEIYKRWIILGLNKIVRMYSPTSILDIRQGPKEPFRDYVDRFYRTLRAEQASQEVKNWMTETLLVQNANPDCRTILKALGPAATLEEMMTACQGVGGPGHKARVLAEAMSQVTNSATVMMQRGNFRNQRKLVKCFNCGKEGHIARNCRAPRKRGCWKCGKEGHQMKDCTERQANFLGKIWPSHKGRPGNFLQSRPEPSAPPEESFRFGEETTTPSQKQEPIDKELYPLASLRSLFGNDPSSQ

SEQ ID NO: 313 - protein, 500 aa, Human immunodeficiency virus
MGARASVLSGGELDRWEKIRLRPGGKKKYKLKHIVWASRELERFAVNPGLLETSEGCRQILGQLQPSLQTGSEELKSFYNTIATLYCVHQKIEVKDTKEALEKIEEEQNKSKKKAQQAAADTGKGSQVSQNYPIVQNLQGQMVHQPLSPRTLNAWVKVVEEKAFSPEVIPMFSALSEGATPQDLNTMLNTVGGHQAAMQMLKETINEEAAEWDRLHPVHAGPIAPGQMREPRGSDIAGTTSNLQEQIAWMTNNPPIPVGEIYKRWIILGLNKIVRMYSPTSILDIRQGPKEPFRDYVDRFYKTLRAEQASQEVKNWMTETLLVQNANPDCKTILKALGPAATLEEMMTACQGVGGPGHKARVLAEAMSQVTNSATIMMQRGNFRNQRKTVKCFNCGKEGHIAKNCRAPRKKGCWKCGKEGHQMKDCTERQANFLGKIWPSHKGRPGNFLQSRPEPTAPPEESFRFGEETTTPSQKQEPIDKELYPLASLRSLFGNDPSSQ

SEQ ID NO: 314 - protein, 500 aa, Human immunodeficiency virus
MGARASVLSGGKLDRWEKIRLRPGGKKKYKLKHIVWASRELERFAVNPGLLETSEGCRQILGQLQPSLQTGSEELKSLFNTVATLYCVHQNIDVRDTKEALDKIEEEQNKSKKKAQQAAADAEKSSQVSQNYPIVQNLQGQMVHQAISPRTLNAWVKVVEEKAFSPEVIPMFSALSEGATPQDLNTMLNTVGGHQAAMQMLKETINEEAAEWDRLHPVHAGPIAPGQMREPRGSDIAGTTSTLQEQIGWMTNNPPIPVGEIYKRWIILGLNKIVRMYSPTSILDIRQGPKEPFRDYVDRFYKTLRAEQASQEVKNWMTETLLVQNANPDCKTILKALGPAATLEEMMTACQGVGGPGHKARVLAEAMSQVTNSATIMMQRGNFRNQRRTVKCFNCGKEGHIAKNCRAPRKKGCWKCGKEGHQMKDCTERQANFLGKIWPSHKGRPGNFLQSRPEPTAPPEESFRFGEETTTPSQKQEPIDKELYPLTSLKSLFGNDPSSQ

SEQ ID NO: 315 - protein, 504 aa, Human immunodeficiency virus
MGARASVLSGGELDRWEKIRLRPGGKKKYRLKHIVWASRELERFAVNPGLLESSEGCRQILGQLQPSLKTGSEELTSLYNTVATLYCVHQRIEIKDTKEALEKIEEEQTKSMKKAQQAAADTGNSSQVSQNYPIVQNLQGQMVHQAISPRTLNAWVKVIEEKAFSPEVIPMFSALSEGATPQDLNTMLNTVGGHQAAMQMLKETINEEAAEWDRLHPVHAGPIAPGQMREPRGSDIAGTTSTLQEQIGWMTNNPPIPVGEIYKRWIILGLNKIVRMYSPVSILDIRQGPKEPFRDYVDRFYKTLRAEQATQEVKNWMTETLLVQNANPDCKTILKALGPAATLEEMMTACQGVGGPGHKARVLAEAMSQVTNPATIMMQRGNFRNQRKNVKCFNCGKEGHIARNCRAPRKKGCWKCGKEGHQMKECTERQANFLGKIWPSYKGRPGNFLQSRPEPTAPPEESFRFGEETATPSQKQEQKQEPIDKELYPLTSLRSLFGNDPSSQ

SEQ ID NO: 316 - protein, 498 aa, Human immunodeficiency virus
MGARASVLSGGELDRWEKIRLRPGGRKKYQLKHIVWASRELERFAINPGLLETSEGCRQILGQLQPSLQTGSEELRSLYNTIATLYCVHQKIDVKDTKEALERIEEEQNKSKTQQAAADTGNSSKVSQNYPIVQNIQGQMVHQAISPRTLNAWVKVVEEKAFSPEVIPMFSALSEGATPQDLNTMLNTVGGHQAAMQMLKETINEEAAEWDRVHPVHAGPIAPGQMREPRGSDIAGTTSTLQEQIGWMTNNPPIPVGEIYKRWIILGLNKIVRMYSPTSILDIRQGPKEPFRDYVDRFYKTLRAEQASQEVKNWMTETLLVQNANPDCKTILKALGPAATLEEMMTACQGVGGPGHKARVLAEAMSQVTNSATIMMQKGNFRNQRKPVKCFNCGREGHIAKNCRAPRKRGCWKCGKEGHQMKDCTERQANFLGKIWPSYKGRPGNFLQSRPEPSAPPEESFRFGEETTTPAQKQEPTDKELYPLASLRSLFGNDPSSQ

SEQ ID NO: 317 - protein, 500 aa, Human immunodeficiency virus
MGARASVLSGGKLDKWEKIRLRPGGKKKYKLKHLVWASRELERFAVNPGLLETAEGCRQILGQLQPSLQTGSEELKSLYNTIAVLYCVHQMIDVKDTKEALEKIEEEQNNSKKKAQQAAADTGNSSQVSRNYPIVQNIQGQMVHQAISPRTLNAWVKVVEEKAFSPEVIPMFSALSEGATPQDLNTMLNTVGGHQAAMQMLKETINEEAAEWDRLHPVQAGPVAPGQMREPRGSDIAGTTSTLQEQIGWMTNNPPIPVGEIYKRWIILGLNKIVRMYSPSSILDIRQGPKESFRDYVDRFYKTLRAEQASQEVKNWMTETLLVQNANPDCKTILKALGPGATLEEMMTACQGVGGPGHKARVLAEAMSQVTNSATIMMQRGNFRNQRKTVKCFNCGKEGHIARNCKAPRKRGCWKCGKEGHQMKDCTERQANFLGKIWPSHKGRPGNFPQSRLEPTAPPEESFRFGEETTTPPQKQEREDKEMYPLASLRSLFGNDPSSQ

SEQ ID NO: 318 - protein, 500 aa, Human immunodeficiency virus
MGARASVLSGGKLDRWEKIRLRPGGKKKYKLKHLVWASRELERFAVNPGLLETSEGCRQILGQLQPSLQTGSEELKSLFNTIATLYCVHQRIEVKDTKEALEKIEEEQNKSKKKAQQTAADTGNSNQVSQNFPIVQNLQGQMVHQAISPRTLNAWVKVVEEKAFSPEVIPMFSALSEGATPQDLNTMLNTVGGHQAAMQMLKETINEEAAEWDRLHPVHAGPIAPGQMREPRGSDIAGTTSTLQEQIGWMTNNPPIPVGEIYKRWIILGLNKIVRMYSPTSILDIRQGPKEPFRDYVDRFYKTLRAEQASQDVKNWMTETLLVQNANPDCKTILKALGPGATLEEMMTACQGVGGPGHKARVLAEAMSQATSSATIMIQRGNFKNQRKTVKCFNCGKEGHIARNCRAPRKKGCWKCGREGHQMKDCTERQANFLGKIWPSHKGRPGNFLQSRPEPTAPPEESFSFGEETTTPSQKQEPIDQGRYPLASLRSLFGNDPSSQ

SEQ ID NO: 319 - protein, 500 aa, Human immunodeficiency virus
MGARASVLSGGELDRWEKIRLRPGGKKKYKLKHIVWASRELERFAVNPSLLETSEGCRQILGQLQSSLQTGSEELKSLYNTVATLYCVHQRIEVKDTKEALDKIEEEQNKSKKKAQQAAADTGNSSQVSQNYPIVQNIQGQMVHQAISPRTLNAWVKVVEEKAFSPEVIPMFSALSEGATPQDLNTMLNTVGGHQAAMQMLKETINEEAAEWDRLHPVQAGPVAPGQMREPRGSDIAGTTSTLQEQIGWMTNNPPIPVGEIYKRWIILGLNKIVRMYSPSSILDIKQGPKEPFRDYVDRFYKTLRAEQASQEVKNWMTETLLVQNANPDCKTILKALGPGATLEEMMTACQGVGGPGHKARVLAEAMSQVTNSATIMMQRGNFRNQRKTVKCFNCGKEGHIAKNCRAPRKKGCWKCGKEGHQMKDCTERQANFLGKIWPSHKGRPGNFLQSRPEPTAPPEESFRFGEETTTPSQKQEPIDKELYPLASLRSLFGNDPSSQ

SEQ ID NO: 320 - protein, 498 aa, Human immunodeficiency virus
  misc_feature (30)..(30): Xaa can be any naturally occurring amino acid
  misc_feature (43)..(43): Xaa can be any naturally occurring amino acid
  misc_feature (149)..(149): Xaa can be any naturally occurring amino acid
  misc_feature (392)..(392): Xaa can be any naturally occurring amino acid
ARASVLSGGELDRWERIRLRPGGKKKYRLXHVVWASRELERFXVNPGLLETSEGCRQILGQLQPALQTGSEELRSLYNTVATLYCVHQKIEIKDTKEALEKIEEEQNKSKKKAQQAAADTGNSSQVSQNYPIVQNLQGQMVHQALSPRXLNAWVKVVEEKAFSPEVIPMFSALSEGATPQDLNTMLNTVGGHQAAMQMLKETINEEAAEWDRLHPVQAGPIAPGQMREPRGSDIAGTTSTLQEQIGWMTNNPPIPVGEIYKRWIIMGLNKIVRMYSPTSILDIRQGPKEPFRDYVDRFYKTLRAEQASQEVKNWMTETLLVQNANPDCKTILKALGPAATLEEMMTACQGVGGPGHKARVLAEAMSQITSPATIMMQKGNFRNQRKIVKCFXCGKEGHIARNCRAPRKKGCWKCGKEGHQMKECTERQANFLGKIWPSHKGRPGNFLQSRPEPTAPPEESFRFGEETITPSQKQEPIDKELYPLASLKSLFGNDPSSQ

SEQ ID NO: 321 - protein, 499 aa, Human immunodeficiency virus
MGARASVLSGGELDKWEKIRLRPGGKKQYKLKHIVWASRELERFAVNPGLLETSDGCRQILGQLQPALQTGSEELKSLYNTVATLYCVHQRIDVRDTKEALDKIEEEQNKSKKKAQQAAADTNSSQVSQNYPIVQNLQGQMVHQAISPRTLNAWVKVVEEKAFSPEVIPMFSALSEGATPQDLNTMLNTVGGHQAAMQMLKETINEEAAEWDRLHPVHAGPIAPGQMREPRGSDIAGTTSTLQEQIGWMTNNPPIPVGEIYKRWIILGLNKIVRMYSPTSILDIRQGPKEPFRDYVDRFYKTLRAEQASQEVKNWMTETLLVQNANPDCKTILKALGPAATLEEMMTACQGVGGPGHKARVLAEAMSQVTNSATVMMQRGNFRNQKKIVKCFNCGKEGHIARNCRAPRKKGCWKCGKEGHQMKDCTERQANFLGKIWPSHKGRPGNFLQSRPEPTAPPEESFRFGEETTTPSQKQETIDKEMYPLASLRSLFGNDPSSQ

SEQ ID NO: 322 - protein, 500 aa, Human immunodeficiency virus
  misc_feature (64)..(64): Xaa can be any naturally occurring amino acid
  misc_feature (106)..(106): Xaa can be any naturally occurring amino acid
  misc_feature (275)..(275): Xaa can be any naturally occurring amino acid
  misc_feature (287)..(287): Xaa can be any naturally occurring amino acid
  misc_feature (366)..(366): Xaa can be any naturally occurring amino acid
MGARASVLSGGKLDKWEKIRLRPGGKKKYKLKHIVWASRELERFALNPGLLETSEGCRQILGQXQPALKTGSEELKSLFNTVATLYCVHQNIEVRDTKEALDKIEXEQNKSKKKAQQAAADTGSSSQVSQNYPIVQNLQGQMVHQPLSPRTLNAWVKVVEEKAFSPEVIPMFSALSEGATPQDLNTMLNTVGGHQAAMQMLKETINEEAAEWDRLHPVQAGPIAPGQIREPRGSDIAGTTSNLQEQIAWMTHNPPIPVGEIYKRWIILGLNKIVXMYSPTSILDIRXGPKEPFRDYVDRFYKTLRAEQASQEVKNWMTETLLVQNANPDCKTILKALGPAATLEEMMTACQGVGGPGHKARVLAEXMSQVTNPSTIMMQRGNFRNQKRTVKCFNCGKEGHIAKNCRAPRKKGCWKCGKEGHQMKDCTERQANFLGKIWPSHKGRPGNFLQSRPEPTAPPEESFRFGEETTNPSPKQEPIDKELYPLTSLRSLFGNDPSLQ

SEQ ID NO: 323 - protein, 499 aa, Human immunodeficiency virus
  misc_feature (219)..(219): Xaa can be any naturally occurring amino acid
  misc_feature (331)..(331): Xaa can be any naturally occurring amino acid
MGARASVLSGGELDKWEKIRLRPGGKKRYRLKHIVWASRELERFAVNPGLLETADGCKQIIAQLQPSLQTGSEELRSLFNTVVTLYCVHKKIEVKDTKEALEKVEEEQNKSKKKAQQAAADTGSNSPVSQNFPIVQNLQGQMVHQALSPRTLNAWVKVVEEKAFSPEVIPMFSALSEGATPQDLNTMLNTVGGHQAAMQMLKETINEEAAEWDRVHPVXAGPVAPGQIREPRGSDIAGTTSNLQEQIAWMTHNPPIPVGEIYKRWIILGLNKIVRMYSPVSILDIRQGPKEPFRDYVDRFYKTLRAEQASQDVKNWMTETLLVQNANPDCXTILKALGPAATLEEMMTACQGVGGPGHKARVLAEAMSQVTTPPAIMMQKGNYRNQRKSVKCFNCGKEGHIAKNCRAPRKKGCWKCGKEGHQMKDCTERQANFLGKIWPSYKGRPGNFLQSRPEPTAPPEESFRFGEETTPPQKQERTDKELYPLASLRSLFGNDPSSQ

SEQ ID NO: 324 - protein, 500 aa, Human immunodeficiency virus
MGARASVLSGGELDRWEKIRLRPGGNKKYKLKHIVWASRELERFAVNPGLLETSEGCRQILGQLQPSLQTGSEELRSLYNTVAVLYCVHQKIEVKDTKEALDKIEEEQNKSKKKAQQAAADTENRNQVSQNYPIVQNLQGQMVHQALSPRTLNAWVKVIEEKAFSPEVIPMFSALSEGATPQDLNTMLNTVGGHQAAMQMLKETINEEAAEWDRLHPVHAGPIAPGQMREPRGSDIAGTTSTLQEQIAWMTNNPPIPVGEIYKRWIILGLNKIVRMYSPVSILDIRQGPKEPFRDYVDRFYKTLRAEQATQEVKNWMTETLLVQNANPDCKTILKALGPGATLEDMMTACQGVGGPGHKARVLAEAMSQVTNTATMMMQRGNFRSPRKTIKCFNCGKEGHIARNCRAPRKKGCWKCGQEGHQMKDCTERQANFLGKIWSSQKGRPGNFPQSRLEPTAPPEESFRFREETTTPSQKQEPIDKELYPLTSLKSLFGNDPSSQ

SEQ ID NO: 325 - protein, 500 aa, Human immunodeficiency virus
MGARASVLSGGELDKWEKIRLRPGGRKKYKLKHIVWASRELERFAVNPGLLETAEGCRQILGQLQPSLQTGSEELRSLFNTVATLYCVHQRIEIKDTKEALDKIEEEQNKSKKKAQQAAADTKNSSQVSQNYPIVQNLQGQMVHQPISPRTLNAWVKVVEEKAFSPEVIPMFSALSEGATPQDLNTMLNTVGGHQAAMQMLKETINEEAAEWDRLHPVHAGPIAPGQMREPRGSDIAGTTSTLQEQIGWMTHNPPIPVGDIYKRWIILGLNKIVRMYSPTSILDIKQGPKEPFRDYVDRFYKVLRAEQASQDVKNWMTETLLVQNANPDCKTILEALGPAATLEEMMTACQGVGGPGHKARVLAEAMSQVSNSATVMMQRGNFRGQRKTVKCFNCGKEGHIARNCRAPRKKGCWRCGKEGHQMKDCTERQANFLGKIWPSHRERPGNFLQSRPEPTAPPQESFRFGEETTAPSQKQEPIDKELYPLASLRSLFGNDPSSQ

SEQ ID NO: 326 - protein, 495 aa, Human immunodeficiency virus
MGARASVLSGGKLDSWEKIRLRPGGKKKYKLKHIVWASRELERFAVNPGLLETSEGCRQILGQLQPSLQTGSEELRSLYNTVATLYCVHERIEVKDTKEALDKVEEEQNKSKKKAQQAAADTGNSSQVSQNYPIVQNIQGQMVHQALSPRTLNAWVKVVEEKAFSPEVIPMFSALSEGATPQDLNTMLNTVGGHQAAMQMLKETINEEAAEWDRLHPVHAGPIAPGQMREPRGSDIAGTTSTLQEQIGWMTNNPPIPVGEIYKRWIIMGLNKIVRMYSPTSILDIRQGPKEPFRDYVDRFYKTLRAEQASQEVKNWMTETLLVQNSNPDCKTILKALGPGATLEEMMTACQGVGGPGHKARVLAEAMSQITNTSATIMMQGGNFRNQRKIKCFNCGKEGHISKNCRAPRKKGCWKCGKEGHQMKDCTERQANFLGKIWPSHKERPGNFLQSRPEPSAPPEESFRFGEETATPSQKQEPKELYPLASLKSLFGNDP

SEQ ID NO: 327 - protein, 500 aa, Human immunodeficiency virus
MGARASVLSGGELDRWEKIRLRPGGKKKYQLKHIVWASRELERFAVNPGLLETSEGCRQILGQLQPALQTGSEELKSLYNTVATLYCVHQKIDVKDTKEALDKIEEEQNKSKKKAQQAAADAGNNSQVSQNYPIVQNLQGQMVHQAISPRTLNAWVKVVEEKAFSPEVIPMFSALSEGATPQDLNTMLNTVGGHQAAMQMLKETINEEAAEWDRLHPVHAGPIAPGQMREPRGSDIAGTTSTLQEQIGWMTNNPPIPVGEIYKRWIILGLNKIVRMYSPTSILDIRQGPKEPFRDYVDRFYKTLRAEQASQEVKNWMTETLLVQNANPDCKTILKALGPAATLEEMMTACQGVGGPGHKARVLAEAMSHVTNSATIMMQKGNFRNQRKIVKCFNCGKEGHIAKNCRAPRKRGCWKCGKEGHQMKDCTERQANFLGKIWPSHKGRPGNFLQSRPEPTAPPEESFRFGEETTTPSQKQEPIDQGMYPLASLRSLFGNDPSSQ

SEQ ID NO: 328 - protein, 505 aa, Human immunodeficiency virus
  misc_feature (184)..(184): Xaa can be any naturally occurring amino acid
MGARASVLSGGELDRWEKIRLRPGGKKKYRLKHIVWASRELERFAVNPGLLETSEGCRQILGQLQPSLQTGSEELRSLFNTVATLYCVHQKIDVKDTKEALDKIQEEQNKCKKKVQQAAADTGNSSQVSQNYPIVQNLQGQMVHQAISPRTLNAWVKVVEEKAFSPEVIPMFSALSEGATPQDXNTMLNTVGGHQAAMQMLKETINEEAAEWDRVHPVQAGPIAPGQMRDPRGSDIAGTTSTLQEQIGWMTSNPPIPVGEIYKRWIILGLNKIVRMYSPTSILDIRQGPKEPFRDYVDRFYKTLRAEQASQEVKNWMTETLLVQNANPDCKTILKALGPAATLEEMMTACQGVGGPGHKARVLAEAMSQVTNTATIMMQKGNFRNQRKIVKCFNCGKEGHIARNCRAPRKRGCWKCGKEGHQMKDCTERQANFLGKIWPSSKGRPGNFLQSRPEQSRLEPTAPPEESFRFGEETTTPPQKQEPIDKELYPLASLRSLFGNDPSSQ

SEQ ID NO: 329 - protein, 507 aa, Human immunodeficiency virus
MGARASVLSGGELDKWEKIRLKPGGKKTYKLKHIVWASRELEQFAVNPGLLETSKGCRQILGQLQPSLQTGSEELRSLYNTVATLYCVHQRIEVKDTKEALDKIEEEQNKSKQKAQQEKAQQAAAAADAGKNTQASQNYPIVQNIQGQMVHQAISPRTLNAWVKVVEEKAFSPEVIPMFSALSEGATPQDLNTMLNTVGGHQAAMQMLKETINEEAAEWDRLHPVHAGPIAPGQMREPRGSDIAGTTSTLQEQIGWMTNNPPIPVGEIYKRWIIMGLNKIVRMYSPTSILDIRQGPKEPFRDYVDRFYKTLRAEQASQEVKNWMTETLLVQNANPDCKTILKALGPAATLEEMMTACQGVGGPGHKARVLAEAMSQVTSSANIMMQRGNFRNQRRIVKCFNCGKEGHIAKNCRAPRKKGCWKCGKEGHQMKDCTERQANFLGKIWPSHKGRPGNFLQSRPEPTAPPEESFRFGEETTAPPQKQEPIDKELYPLASLRSLFGNDPSSQ

SEQ ID NO: 330 - protein, 498 aa, Human immunodeficiency virus
ARASVLSGGQLDKWEKIRLRPGGKKRYQLKHIVWASRELERFAVNPGLLETSEGCRQILGQLQPALQTGSEELKSLFNTVATLYCVHQRIDVRDTKEALDKIEEEQNKSKKKTQQAAADTENSSQVSQNYPIVQNLQGQMVHQAISPRTLNAWVKVVEEKSFSPEVIPMFAALSEGATPQDLNTMLNTVGGHQAAMQMLKETINEEAAEWDRVHPVHAGPIAPGQMREPRGSDIAGTTSTLQEQIGWMTNNPPIPVGDIYKKWIIIGLHKIVRMYSPTSILDIRQGPKEPFRDYVDRFYKTLRAEQASQEVKNWMTETLLVQNANPDCRTILKALGPAATLEEMMTACQGVGGPGHKARVLAEAMSQVTGSATIMMQKGNFRNQRKTVKCFNCGKVGHIAKNCRAPRKKGCWKCGKEGHQMKECDERQANFLGKIWPSHKGRPGNFLQSRPEPTAPPEESFRFGEETTTPSQKQEPIDKELYPLASLRSLFGNDPSSQ

SEQ ID NO: 331 - protein, 501 aa, Human immunodeficiency virus
MGARASVLSGGKLDSWERIRLRPGGKKKYRLKHIVWASRELERFAVNPGLLETAEGCKQILEQLQPALRTGSEELRSLYNTIATLYCVHQRIEVKDTKEALDKIEEEQNKSKKKAQQAAADTGNNSQVSQNYPIVQNMQGQMVHQAISPRTLNAWVKVVEEKAFSPEVIPMFSALSEGATPQDLNTMLNTVGGHQAAMQMLKETINEEAAEWDRLHPVQAGPIAPGQMREPRGSDIAGTTSTLQEQIGWMTNNPPIPVGEIYKRWIILGLNKIVRMYSPTSILDIRQGPKEPFRDYVDRFYKTLRAEQASQEVKNWMTETLLVQNANPDCKTILKALGPAATLEEMMTACQGVGGPGHKARVLAEAMSQVTGPATIMMQKGNFRNQRKIVKCFNCGKEGHIARNCRAPRKKGCWKCGKEGHQMKDCTERQANFLGKIWPSHKGRPGNFLQSRPEPSAPPAESFRFGEETTTPSQKQEPIDKDLYPPLASLKSLFGNDPSSQ

SEQ ID NO: 332 - protein, 503 aa, Human immunodeficiency virus
MGARASILSGGKLDRWEKIRLRPGGKKKYKLKHLVWASRELERFAVNPGLLETAEGCRQILGQLQPSLQTGSEELKSLFNAVAVLYCVHQGIDVKDTKEALERIEEEQEKSKKKAQQAAADPGKSSQVSQNYPIVQNIQGQMVHQSLSPRTLNAWVKVIEEKAFSPEVIPMFSALSEGATPQDLNTMLNTVGGHQAAMQMLKETINEEAAEWDRLHPVHAGPIAPGQMREPRGSDIAGTTSTLQEQIGWMTNNPPIPVGEIYKRWIILGLNKIVRMYSPVSILDIKQGPKEPFRDYVDRFYKTLRAEQATQEVKNWMTETLLVQNANPDCKTILKALGPGATLEEMMTACQGVGGPGHKARVLAEAMSQVTNSATIMMQRGNFKNQRKIVKCFNCGKEGHIAKNCRAPRKKGCWKCGKEGHQMKDCTERQANFLGKIWPSHKGRPGNFLQSRPEPTAPTAPPEESFRFREETTTPSQKQEPIDREMYPLTSLRSLFGNDPSSQ

SEQ ID NO: 333 - protein, 498 aa, Human immunodeficiency virus
RASILSGGKLDRWEKIRLRPGGKKKYKLKHIVWASRELERFAVNPGLLETSEGCRQILGQLQPSLPTGSEELKSLFNTVATLYCVHQNIDVKDTKEALEKIEEEQNKSKKKAQQAAADTGNSSQGSQNYPIVQNIQGQMVHQAISPRTLNAWVKVVEEKAFSPEVIPMFTALSEGATPQDLNTMLNTVGGHQAAMQMLKETINEEAAEWDRLHPVHAGPVAPGQMREPRGSDIAGTTSNLQEQIGWMTNNPPIPVGEIYKRWIILGLNKIVRMYSPSSILDIKQGPKEPFRDYVDRFYKTLRAEQASQEVKNWMTETLLVQNSNPDCKTILKALGPAATLEEMMTACQGVGGPGHKARVLAEAMSQVTNSATVMMQRGNFRNQRKTVKCFNCGKEGHIARNCKAPRRRGCWKCGKEGHQMKDCTERQANFLGKIWPSHKGRPGNFLQSRPEPTAPPEESFRFGEETTTPSPKQEPIDKDLYPPLASLKSLFGNDPLSQ

SEQ ID NO: 334 - protein, 505 aa, Human immunodeficiency virus
MGARASVLSGGKLDKWEKIRLRPGGKKKYKLKHIVWASRELERFAVNPGLLETTEGCRQILGQLQPSLQTGTEELRSLYNTIAVLYCVHQRIDIKDTKEALDKIEEEQDKSKQKAQQAAADTGNSNNQVSQNYPIVQNLQGQMVHQAISPRTLNAWVKVVEEKAFSPEVIPMFSALSEGATPQDLNTMLNTVGGHQAAMQMLKETINEEAAEWDRLHPVHAGPIAPGQMREPRGSDIAGTTSTLQEQVGWMTSNPPIPVGEIYKRWIILGLNKIVRMYSPTSILDIRQGPKEPFRDYVDRFYKTLRAEQASQEVKNWMTETLLVQNANPDCKTILKALGPAATLEEMMTACQGVGGPGHKARVLAEAMSRVTNSNAIMMQRGNFKNQRKTVKCFNCGKEGHIARNCRAPRKKGCWKCGREGHQMKDCTERQANFLGKIWPSHKGRPGNFLQSRPEPTAPPAESFRFGEETTAPPQKQEPIDKEQGQELYPLASLRSLFGNDPSSQ

SEQ ID NO: 335 - protein, 500 aa, Human immunodeficiency virus
  misc_feature (50)..(50): Xaa can be any naturally occurring amino acid
  misc_feature (55)..(55): Xaa can be any naturally occurring amino acid
  misc_feature (191)..(191): Xaa can be any naturally occurring amino acid
  misc_feature (271)..(271): Xaa can be any naturally occurring amino acid
  misc_feature (295)..(295): Xaa can be any naturally occurring amino acid
  misc_feature (304)..(304): Xaa can be any naturally occurring amino acid
MGARASVLSGGELDRWEKIRLRPGGKKQYKLKHIVWASRELERFAINPGXLETSXGCRQILGQIQPSLQTGSEELRSLYNTIAVLYCVHQRIEVRDTKEALDKIEEEQNKSKKKEQQAAANTGNSSQVSQNYPIVQNLQGQMVHQPISPRTLNAWVKVVEEKAFSPEVIPMFSALSEGATPQDLNLMLNTXGGHQAAMQMLKETINEEAADWDRLHPVHAGPVAPGQMREPRGSDIAGTTSTLQEQIGWMTHNPPIPVGEIYKRWIILGLXKIVRMYSPTSILDIKQGPKEPFRXYVDRFYRTXRAEQASQEVKNWMTETLLVQNSNPDCKTILKALGPGATLEEMMTACQGVGGPGHKARVLAEAMSQVTNSATIMMQRGNFKNQRKMVKCFNCGKEGHIARNCRAPRKKGCWKCGKEGHQMKDCTERQANFLGKIWPSHKGRPGNFLQSRPEPTAPPEESFRFGEETATPPQKQEPKDKELYPLASLRSLFGNDPSSQ

SEQ ID NO: 336 - protein, 494 aa, Human immunodeficiency virus
MGARASVLSGGELDKWEKIRLRPGGKKKYKLKHIVWASRELERFAVNPGLLETAEGCKQILGQLQPALQTGSEELKSLFNTVATLYCVHQKIEVKDTKEALEKVEEEQNKSKKKAQQAAADTGNNSPVSQNYPIVQNLQGQMVHQALSPRTLNAWVKVIEEKAFSPEVIPMFSALSEGATPQDLNTMLNTVGGHQAAMQMLKETINEEAAEWDRLHPVHAGPIAPGQMREPRGSDIAGTTSSLQEQIAWMTNNPPIPVGEIYKRWIILGLNKIVRMYSPISILDIRQGPKEPFRDYVDRFYKTLRAEQASQEVKNWMTETLLVQNANPDCKTILKALGPAATLEEMMTACQGVGGPGHKARVLAEAMSQVTNSATIMMQKGNFRGQRKIVKCFNCGKEGHIAKNCRAPRKKGCWKCGKEGHQMKDCTERQANFLGKIWPSYKGRPGNFLQSRPEPTAPPEESFRFGEETTPSQKQERIPLTSLRSLFGNDPSSQ

SEQ ID NO: 337 - protein, 505 aa, Human immunodeficiency virus
MGARASVLSGGELDRWEKIRLRPGGKKKYKLKHIVWASRELERFAVNPSLLETSEGCRQILRQLQPSLQTGSEELKSLYNTVATLYCVHQRIEIKDTKEALDKIEEEQNKSKKKAQQTAADTGNSSQNSSQVSQNYPIVQNLQGQMVHQAISPRTLNAWVKVVEEKAFSPEVIPMFSALSEGATPQDLNTMLNTVGGHQAAMQMLKETINEEAAEWDRLHPVHAGPAAPGQMREPRGSDIAGTTSTLQEQIGWMTNNPPIPVGEIYKRWIILGLNKIVRMYSPISILDIKQGPKEPFRDYVDRFYKTLRAEQATQEVKNWMTETLLVQNANPDCKTILKALGPAATLEEMMSACQGVGGPSHKARVLAEAMSQATNSAAAIMMQRGNFRNQRKTVKCFNCGKEGHIAKNCRAPRKKGCWKCGKEGHQMKDCTERQANFLGKIWPSHKGRPGNFLQSRPEPTAPPEYSFRFGEETTTPSQKQEPIDKETYPLASLKSLFGNDPSSQ

SEQ ID NO: 338 - protein, 506 aa, Human immunodeficiency virus
MGARASVLSGGQLDRWEKIRLRPGGKKRYKLKHIVWASRELERFAVNPGLLETSEGCRQILGQLQPTLQTGSEEIKSLYNTVAVLYCVHQRIEVKDTKEALDKIEEEQNKSKKKAQQAAADTGNSSQVSQNYPIVQNLQGQMVHQAISPRTLNAWVKVVEEKAFGPEVIPMFSALSEGATPQDLNTMLNTVGGHQAAMQMLKETINEEAAEWDRLHPVHAGPIAPGQMREPRGSDIAGTTSTLQEQIGWMTHNPPIPVGEIYKRWIILGLNKIVRMYSPTSILDIRQGPKEPFRDYVDRFYKTLRAEQASQEVKNWMTETLLVQNANPDCKTILKALGPAATLEEMMTACQGVGGPGHKARVLAEAMSQATNTATIMMMQRGNFRNQRKAVKCFNCGKEGHIARNCRAPRKKGCWKCGKEGHQMKECTERQANFLGKIWPSSKGRPGNFLQSRQGQNRLEPTAPPEESFRFGEETTTPPQKQEPIDKELYPLASLKSLFGNDPSSQ

SEQ ID NO: 339 - protein, 501 aa, Human immunodeficiency virus
  misc_feature (313)..(313): Xaa can be any naturally occurring amino acid
MGARASVLSGGELDRWEKIRLRPGGKKKYKLKHIVWASRELERFAVNPGLLETAEGCRQILGQLQPALQTGSEELKSLFNTVATLYCVHQKIEIKDTKEALDKIEEEQNKSKKKAQQAAADAGNNSSQVSQNYPIVQNLQGQMVHQSLSPRTLNAWVKVIEEKAFSPEVIPMFSALSEGATPQDLNTMLNTVGGHQAAMQMLKETINEEAAEWDRLHPVHAGPVAPGQMREPRGSDIAGTTSTLQEQIGWMTNNPPIPVGEIYKRWIILGLNKIVRMYSPVSILDIKQGPKEPFRDYVDRFYKTLRAEQATQXVKNWMTETLLVQNANPDCKTILKALGPAATLEEMMTACQGVGGPGHKARVLAEAMSQVTNSATIMMQRGNFRSQRKTVKCFNCGKEGHIAKNCRAPRKRGCWKCGKEGHQMKDCTERQANFLGKIWPSNKGRPGNFLQSRPEPTAPPEESFRFGEETTTPSQKQEPIDKELYPLASLRSLFGNDPSSQ

SEQ ID NO: 340 - protein, 498 aa, Human immunodeficiency virus
MGARASVLSGGKLDKWEKIRLRPGGKKKYKLKHLVWASRELERFAVNPGLLETSEGCRQILRQLQPSLQTGSEELKSLFNTVAVLYCVHQNIEIKDTKEALDEIEEEQNKSKKKAQQAAADTGNSSSQVSQNYPIVQNLQGQMVHQAISPRTLNAWVKVVEEKAFSPEVIPMFSALSEGATPQDLNTMLNTVGGHQAAMQMLKETINEEAAEWDRLHPVHAGPIAPGQMREPRGSDIAGTTSTLQEQIGWMTNNPPIPVGEIYKRWIILGLNKIVRMYSPTSILDIKQGPKEPFRDYVDRFYKTLRAEQASQDVKNWMTETLLVQNANPDCKTILKALGPAATLEEMMTACQGVGGPGHKARVLAEAMSQMTNSAAIMVQRGNFRDQRKIIKCFNCGKQGHIAKNCRAPRKKGCWKCGQEGHQMKDCTERQANFLGKIWPSHKGRPGNFLQSRPEPTAPPEESFRFGEETTPPSQKQEPIDKELYPLASLKSLFGNDP

SEQ ID NO: 341 - protein, 494 aa, Human immunodeficiency virus
  misc_feature (17)..(17): Xaa can be any naturally occurring amino acid
  misc_feature (28)..(28): Xaa can be any naturally occurring amino acid
MGARASVLSGGELDQWXRIRLRPGGKKXYKLKHIVWASRELERFAVNPGLLETSEGCRQILGQLQPSLQTGSEELRSLYNTVATLYCVHQKIEVKDTKEALEKIEEEQNKSKKKAQQEAADTGKSSQVSQNYPIVQNLQGQMVHQALSPRTLNAWVKVVEEKAFSPEVIPMFSALSEGATPQDLNTMLNTVGGHQAAMQMLKETINEEAAEWDRVHPVHAGPIAPGQMREPRGSDIAGTTSTLQEQIGWMTNNPPIPVGEIYKRWIILGLNKIVRMYSPISILDIRQGPKESFRDYVDRFYKTLRAEQASQEVKNWMTETLLVQNANPDCKTILKALGPAATLEEMMTACQGVGGPGHKARVLAEAMSQVTGTANIMMQRGNFRNQRKIVKCFNCGKEGHIAKNCRAPRKKGCWKCGKEGHQMKDCTERQANFLGKIWPSHKGRPGNFPQSRTEPTAPPEESFRFGEETTTPPQKEEPPLVSLRSLFGNDPSSQ

SEQ ID NO: 342 - protein, 500 aa, Human immunodeficiency virus
  misc_feature (15)..(15): Xaa can be any naturally occurring amino acid
  misc_feature (267)..(267): Xaa can be any naturally occurring amino acid
  misc_feature (331)..(331): Xaa can be any naturally occurring amino acid
  misc_feature (343)..(343): Xaa can be any naturally occurring amino acid
  misc_feature (374)..(374): Xaa can be any naturally occurring amino acid
  misc_feature (453)..(453): Xaa can be any naturally occurring amino acid
  misc_feature (473)..(473): Xaa can be any naturally occurring amino acid
MGARASVLSGGKLDXWEKIRLRPGGKKQYKLKHIVWASRELERFAVNPGLLETSDGCRQILEQLQPALQTGSEELRSLFNTVAVLYCVHQRIDVKDTKEALDKIEEEQNKSKKKAQQAAAGTGNSSQVSQNYPIVQNLQGQMVHQALTPRTLNAWVKVIEEKAFSPEVIPMFSALSEGATPQDLNTMLNTVGGHQAAMQMLKETINEEAAEWDRLHPVHAGPIAPGQLREPRGSDIAGTTSTLQEQIGWMTNNPPIPVGEIYKRWIXLGLNKIVRMYSPVSILDIKQGPKEPFRDYVDRFYKTLRAEQATQEVKNWMTETLLVQNANPDCXTILKALGPGATXEEMMTACQGVGGPGHKARVLAEAMSQATAAXTIMMQKGNFRNQRKTIKCFNCGKEGHLARNCRAPRKRGCWKCGQEGHQMKDCTERQANFLGKLWPSQKGRPGNFLQNRXEPTAPPAESFRFGEETTTPXQKQEQIDKELNHSASLKSLFGNDPLLQ

SEQ ID NO: 343 - protein, 500 aa, Human immunodeficiency virus
  misc_feature (384)..(384): Xaa can be any naturally occurring amino acid
MGARASILSGGQLDRWEKIRLRPGGKKQYKLKHLIWAGRELERFAVNPGLLETSEGCRQIIKQLQPSLQTGSEELRSLFNTVATLYCVHQRIDVKDTKEALDKIEEEQNKCKKKAEQAAADTGNSSQVSQNYPIVQNLQGQMVHQAITPRTLNAWVKVVEEKAFSPEVIPMFSALSEGATPQDLNTMLNTVGGHQAAMQMLKETINEEAAEWDRLHPVHAGPIAPGQMREPRGSDIAGTTSTLQEQIGWMTSNPPIPVGEIYKRWIIMGLNKIVRMYSPVSILDIRQGPKEPFRDYVDRFYKTLRAEQASQDVKNWMTETLLVQNANPDCKTILKALGPAATLEEMMTACQGVGGPGHKARVLAEAMSQVTNSTTVMMQRGNFXNQRKTIKCFNCGKEGHLARNCRAPRKKGCWKCGKEGHQMKECTERQANFLGKIWPSHKGRPGNFLQSRPEPTAPPEESFRFGEETTTPSQKQETIDKELYPLASLKSLFGNDPSYQ

SEQ ID NO: 344 - protein, 501 aa, Human immunodeficiency virus
MGARASVLSGGELDKWEKIRLRPGGKKKYRLKHIVWASRELERFALNPSLLETSGGCRQILGQLQPSLQTGSEELKSLFNTIAVLYCVHQRIDVKDTKEALDKIEEEQNKTKKKAQQAAADTGNSSQVSQNYPIVQNLQGQMVHQPISPRTLNAWVKVVEEKAFSPEVIPMFTALSEGATPQDLNTMLNTVGGHQAAMQMLKETINEEAAEWDRLHPVHAGPIAPGQMREPRGSDIAGTTSTLQEQIAWMTNNPPIPVGDIYKRWIILGLNKIVRMYSPSSILDIKQGPKEPFRDYVDRFYKTLRAEQASQDVKNWMTETLLVQNSNPDCKTILKALGPAATLEEMMTACQGVGGPSHKARVLAEAMSQMTSPANIMMQRGNFKNQRKIVKCFNCGKEGHIARNCRAPRKKGCWKCGQEGHQMKDCTERQANFLGKIWPSHKGRPGNFLQSRPEPTAPPAESLMFGEETTTPPQKQEPRDKELYPPLASLRSLFGNDPSSQ

SEQ ID NO: 345 - protein, 501 aa, Human immunodeficiency virus
MGARASVLSGGELDRWEKIRLRPGGKKRYKLKHIVWASRELERFALNPGLLETSEGCRQIIGQLQPSLQTGSEELKSLYNTVATLYCVHQKIDVKDTKEALDKIEEEQNKSKKKAQQAVAGTGNNSQVSQNYPIVQNMQGQMVHQAISPRTLNAWVKVVEEKAFSPEVIPMFTALSEGATPSDLNTMLNTVGGHQAAMQMLKETINEEAAEWDRLHPVHAGPIAPGQMREPRGSDIAGTTSTLQEQIAWMTSNPPIPVGDIYKRWIILGLNKIVRMYSPTSILDIKQGPKEPFRDYVDRFYKTLRAEQASQDVKNWMTETLLVQNANPDCKTILKALGPGATLEEMMTACQGVGGPSHKARVLAEAMSQATNSAAIMMQRGNFRNQRKTVKCFNCGREGHIAKNCRAPRKKGCWKCGKEGHQMKDCTTERQANFLGKIWPSHKGRPGNFLQSRPEPTAPPAESFGFGEEKTTPSQKPETTDKELYPLASLKSLFGNDPSSQ

SEQ ID NO: 346 - protein, 493 aa, Human immunodeficiency virus
ASVLSGGKLDTWEKIRLRPGGKKKYKLKHIVWASRELERFALNPGLLETAEGCRQLLGQLQPSLQTGSEELKSLFNTIATLYCVHQRIEVRDTKEALDKIEEEQNKSKKKAQQAAAAADTGNSSQVSQNYPIVQNLQGQMVHQAISPRTLNAWVKVIEEKAFSPEVIPMFAALSEGATPQDLNTMLNTVGGHQAAMQMLKETINEEAAEWDRIHPAQAGPIAPGQIRDPRGSDIAGTTSTLQEQITWMTNNPPIPVGEIYKKWIIMGLNKIVRMYSPTSILDIRQGPKEPFRDYVDRFYKTLRAEQASQEVKNWMTETLLVQNANPDCKTILKALGPAATLEEMMTACQGVGGPGHKARVLAEAMSQVTNSGAIMMQKGNFRNQVVRCFNCGKVGHIAKNCRAPRKKGCWKCGKEGHQMKDCDQRQANFLGKIWPSHKGRPGNFLQSRPEPTAPPAESFRFGEETTTPSQKQEPQEYPLASLRSLFGNDPSSQ

SEQ ID NO: 347 - protein, 502 aa, Human immunodeficiency virus
MGARASVLSGGKLDRWEKIRLRPGGKKKYKLKHIVWASRELERFAVNPGLLETSEGCRQILGQLQPSLQTGSEELKSLYNTIAVLYCVHQNIDVKDTKEALDMIEEEQNKSKKKAQQAAAAADTGNSGNVSQNYPIVQNLQGQMVHQPISPRTLNAWVKVVKEKAFSPEVIPMFAALSEGATPQDLNTMLNTVGGHQAAMQMLKETINEEAAEWDRLHPVHAGPIAPGQMREPRGSDIAGTTSTLQEQIAWMTNNPAIPVGEIYKKWIIMGLNKIVRMYSPTSILDIRQGPKEPFRDYVDRFYKTLRAEQASQEVKNWMTETLLVQNANPDCKTILKALGPGATLEEMMTACQGVGGPGHKARVLAEAMSQVTNSATVMMQRGNPRNQRKTIKCFNCGKEGHLARNCRAPRKRGCWKCGKEGHQMKDCTERQANFLGKIWPSHKGRPGNFLQSRPEPSAPPEESFRFGEETTAPPQKQEPRDKELYPVTSLRSLFGNDPSSQ

SEQ ID NO: 348 - protein, 499 aa, Human immunodeficiency virus
MGARASVLSGGELDRWEKIRLRPGGKKKYKLKHIVWASRELERFAVNPSLLETSEGCRQILGQLQPSLQTGSEELKSLFNTVATLYCVHQRIEVKDTKEALEKIEEEQNKSKKKAQQAAADTGNSGQVSQNYPIVQNLQGQMVHQAISPRTLNAWVKVVEEKAFSPEVIPMFSALSEGATPQDLNTMLNTVGGHQAAMQMLKETINEEAAEWDRLHPVHAGPVAPGQMREPRGSDIAGTTSTLQEQIGWMTNNPPIPVGDIYKRWIIMGLNKIVRMYSPTSILDVKQGPKEPFRDYVDRFYKILRAEQASQEVKHWMTETLLVQNANPDCKTILKALGPAATLEEMMTACQGVGGPGHKARVLAEAMSQVTNSTIMMQKGNFRNQRKTVKCFNCGKEGHIAKNCRAPRKKGCWKCGKEGHQMKDCSERQANFLGKIWPSHKGRPGNFLQSRPEPTAPPEESFRFGEETTTPSQKQEPIDKEQYPLASLRSLFGNDPSSQ

SEQ ID NO: 349 - protein, 504 aa, Human immunodeficiency virus
MGARASVLSGGELDKWEKIRLRPGGKKQYKLKHIVWASRELERFAVNPGLLETSEGCRQILRQLQPSLQTGSEELKSLFNTVAVLYCVHQRIEVRDTKEALDKIEEEQNKSKKQAQQAAAGTGNNTGNNSQVSQNYPIVQNLQGQMVHQAISPRTLNAWVKVVEEKAFSPEVIPMFSALSEGATPQDLNTMLNTVGGHQAAMQMLKETINEEAAEWDRLHPPQAGPIAPGQIREPRGSDIAGTTSNLQEQITWMTNNPPIPVGEIYKRWIIMGLNKIVRMYSPTSILDIRQGPKEPFRDYVDRFYKTLRAEQASQEVKNWMTKTLLVQNANPDCKTILKALGPAATLEEMMTACQGVGGPGHKARVLAEAMSQVTNSATVMMQRGNFKGQRKIVKCFNCGKEGHIARNCRAPRKKGCWKCGQEGHQMKDCTGRQANFLGKIWPSHKGRPGNFLQSRPEPTAPPAESFRFGEETPTPSQKQETIDKELYPLASLKSLFGNDPSSQ

SEQ ID NO: 350 - protein, 500 aa, Human immunodeficiency virus
MGARASILSGGELDRWEKIRLRPGGKKKYKLKHIVWASRELERFAVNPGLLETSEGCRQILEQLQPSLQTGSEELKSLFNTIATLYCVHQRIEIKDTKEALEKIEEEQNKSKKKAQQAAADTGNSKQVSQNYPIVQNLQGQMVHQAISPRTLNAWVKVVEEKAFSPEVIPMFTALSEGATPQDLNTMLNTVGGHQAAMQMLKETINEEAAEWDRVHPVHAGPIAPGQMREPRGSDIAGTTSTLQEQIAWMTNNPPVPVGEIYKRWIILGLNKIVRMYSPTSILDIRQGPKEPFRDYVDRFYKTLRAEQASQDVKNWMTETLLVQNSNPDCKTILKALGPAATLEEMMTACQGVGGPGHKARVLAEAMSQATSSNTIMMQRGNFRNQRKTIKCFNCGKEGHIAKNCRAPRKKGCWKCGKEGHQMKDCTERQANFLGKIWPSHKGRPGNFLQSRPEPTAPPEESFRFGEETTTPPQKQEPIDKELYPLASLKSLFGNDPSSQ

SEQ ID NO: 351 - protein, 499 aa, Human immunodeficiency virus
MGARASVLSGGELDRWEKIRLRPGGKKQYKLKHIVWASRELERFALNPGLLETSEGCRQILGQLQPAIQTGSEELRSLFNTVATLYCVHQRIDIKDTKEALDKIEEEQNKSKKKVQQEAADTGSKSQVSQNYPIVQNIQGQMVHQPISPRTLNAWVKVVEEKAFSPEVIPMFSALAEGATPQDLNTMLNTVGGHQAAMQMLKETINEEAAEWDRVHPVHAGPVAPGQMREPRGSDIAGTTSTLQEQIGWMTNNPPIPVGEIYKRWIILGLNKIVRMYSPTSILDIRQGPKEPFRDYVDRFYKTLRAEQASQEVKNWMTETLLVQNANPDCKTILKALGPAATLEEMMTACQGVGGPGHKARVLAEAMSQMNSATIMMQKSNFRNQRKIVKCFNCGKEGHIARNCRAPRKKGCWKCGKEGHQMKDCTERQANFLGKIWPSHKGRPGNFLQSRPEPTAPPEESFRFGEETTTPSQKQEPIDKELYPLASLRSLFGNDPSSQ

SEQ ID NO: 352 - protein, 500 aa, Human immunodeficiency virus
MGARASVLSGGELDRWEKIRLRPGGKKMYKLKHIVWASRELERFALNPGLLETSEGCKQILTQLQPSLQTGSEELKSLFNTVATLYCVHQRIEVRDTKEALDKIEEEQNKSKKKAQQAAADTGSSSQVSQNYPIVQNLQGQMVHQAISPRTLNAWVKVVEEKAFSPEVIPMFSALSEGATPQDLNTMLNTVGGHQAAMQMLKETINEEAAEWDRLHPVHAGPIAPGQMREPRGSDIAGTTSTLQEQIGWMTHNPPIPVGEIYKRWIILGLNKIVRMYSPSSILDIKQGPKEPFRDYVDRFYKTLRAEQASQEVKNWMTETLLVQNANPDCKTILKALGPAATLEEMMTACQGVGGPGHKARVLAEAMSQLTNSANIMMQRGNMRNQRKTVKCFNCGKEGHIARNCRAPRKKGCWKCGKEGHQMKDCTERQANFLGKIWPSHKGRPGNFLQSRPEPSAPPEESFRFGEETTTPPQKQEPIDKEVFPLASLKSLFGNDPSSQ

SEQ ID NO: 353 - protein, 503 aa, Human immunodeficiency virus
MGARASVLSGGKLDQWERIRLRPGGNKRYKLKHIVWASRELERFAVNPGLLETAEGCRQILGQLQPSLQTGSEELKSLYNTIATLYCVHQRIDVKDTKEALDKIEEEQNKSKKKAQQAAAATGNNSQSSQVSQNYPIVQNLQGQMVHQPLSPRTLNAWVKVVEEKAFSPEVIPMFTALSEGATPQDLNTMLNTVGGHQAAMQMLKETINEEAAEWDRLHPAQAGPIAPGQIREPRGSDIAGTTSTLQEQITWMTNNPPIPVGEIYKRWIILGLNKIVRMYSPTSILDIRQGPKEPFRDYVDRFYKTLRAEQASQEVKNWMTETLLVQNANPDCKTILKALGPAASLEEMMTACQGVGGPGHKARVLAEAMSQVTNSNTIMMQRGNFRNQRKIVKCFNCGKEGHIARNCRAPRKKGCWKCGKEGHQMKECTERQANFLGKIWPSHKGRPGNFLQSRPEPTAPPEESFRFGEEAPAPSQKQETIDKELYPSASLRSLFGNDPSSQ

SEQ ID NO: 354 - protein, 500 aa, Human immunodeficiency virus
MGARASVLSGGELDRWEKIRLRPGGKKRYKLKHIVWASRELERFAVNPGLLETSGGCRQILEQLQPALQTGSEELKSLYNTVATLYCVHQRIEVKDAKEALEKIEEEQNKSKKKAQQAAADAGNNRQVSQNYPIVQNLQGQMVHQAISPRTLNAWVKVVEEKAFSPEVIPMFSALSEGATPQDLNTMLNTVGGHQAAMQMLKETINEEAAEWDRLHPVHAGPIAPGQMREPRGSDIAGTTSTLQEQIGWVTNNPPIPVGEIYKRWIILGLNKIVRMYSPTSILDIKQGPKEPFRDYVDRFYKTLRAEQASQDVKNWMTETLLVQNANPDCKTILKALGPAATLEEMMTACQGVGGPGHKARVLAEAMSQVTNSASIMMQRGNFRNQKKIVKCFNCGKDGHIAKNCRAPRKRGCWKCGQEGHQMKDCTERQANFLGKIWPSYKGRPGNFLQSRPEPTAPPEESFRFGEETTTPSQKQEPIDKELYPLASLKSLFGNDPSSQ

SEQ ID NO: 355 - protein, 499 aa, Human immunodeficiency virus
MGARASVLSGGQLDRWEKIRLRPGGKKKYKLKHIVWASRELERFAVNPGLLETSDGCRQILEQLQPALKTGSEELRSLYNTVATLYCVHQKIEVKDTKEALEKIEEEQNKSKKKAQQAAADTGNSSQVSHNYPIVQNIQGQMVHQALSPRTLNAWVKVVEEKAFSPEVIPMFSALSEGATPQDLNTMLNTVGGHQAAMQMLKETINEEAAEWDRLHPAHAGPVAPGQMREPRGSDIAGTTSTLQEQIGWMTHNPPIPVGEIYKRWIILGLNKIVRMYSPVSILDIRQGPKEPFRDYVDRFYKTLRAEQASQDVKNWMTETLLVQNANPDCKTILKALGPAATLEEMMTACQGVGGPSHKARILAEAMSQVTNLPTIMMQKGNFRGQRKIKCFNCGKEGHLAKNCRAPRKRGCWKCGKEGHQMKDCTERQANFLGKIWPSHKGRPGNFLQSRPEPSAPPEESFRFGEGTTTPSQKQEPIDKETYPLTSLRSLFGNDPSSQ

SEQ ID NO: 356 - protein, 463 aa, Human immunodeficiency virus
MGARASVLSGGQLDAWEKIRLRPGGKKKYRLKHIVWASRELERFAVNPGLLETAAGCRQILNQLQPSLQTGSEELKSLFNTVAVLYCVHQRIDVKDTKEALDKIEEEQNKSKKKAQQAVADAGNNSQVSQNYPIVQNLQGQMVHQAISPRTLNAWVKVVEEKAFSPEVIPMFSALSEGATPQDLNTMLNTVGGHQAAMQMLKETINEEAAEWDRLHPVHAGPVAPGQMREPRGSDIAGTTSTLQEQIGWMTNNPPIPVGEIYKSWIILGLNKIVRMYSPTSILDIRQGPKEPFRDYVDRFYKTLRAEQASQEVKNWMTETLLVQNANPDCKTILKALGPAATLEEMMTACQGVGGPGHKARVLAEAMSQATNSATIMMQRGNFRNQRKTVKCFNCGKEGHIARNCRAPRKKGCWKCGKEGHQIKDCTERQANFLGKIWPSSKGRPGNFLQSRPEPTAPPEESF

SEQ ID NO: 357 - protein, 462 aa, Human immunodeficiency virus
MGARASVLSGGELDKWEKIRLRPGGKKKYQLKHIVWASRELERFAVNPSLLETSEGCRQILGQLQPALQTGSEELKSLHNTVAVLYCVHQRIDVKDTKEALEKIEEEQNKSKKKAQQAAANTGNSNQISQNYPIVQNLQGQMVHQAISPRTLNAWVKVVEEKAFSPEVIPMFSALSEGATPQDLNTMLNTVGGHQAAMQMLKETINEEAAEWDRLHPVHAGPIAPGQMREPRGSDIAGTTSTLQEQIGWMTNNPPIPVGEIYKRWIILGLNKIVRMYSPTSILDIRQGPKEPFRDYVDRFYKTLRAEQASQDVKNWMTETLLVQNANPDCKTILKALGPAATLEEMMTACQGVGGPGHKARVLAEAMSQVTNSTTIMMQRGNDRNQRKIKCFNCGKEGHLARNCRAPRKRGCWKCGQEGHQMKECPGRQANFLGKIWPSHKGRPGNFLQNRPEPTAPPEESF

SEQ ID NO: 358 - protein, 500 aa, Human immunodeficiency virus
MGARASVLSGGDLDRWEKIRLRPGGKKKYMLKHIVWASRELERFAVNPGLLETSEGCRQVLEQLQPSLQTGSEELRSLYNTIATLYGVHQKIEVKDTKEALDKIEEEQNKSKKKAQQAAADTGHSSQVSQNYPIVQNLQGQMVHQAISPRTLNAWVKVIEEKAFSPEVIPMFSALSEGATPQDLNTMLNTVGGHQAAMQMLKETINEEAAEWDRVHPVQAGLIAPGQMREPRGSDIAGTTSTLQEQIGWMTSNPPIPVGEIYKRWIILGLNKIVRMYSPISILDIRQGPKEPFRDYVDRFYKTLRAEQASQEVKNWMTETLLVQNANPDCKTILKALGPGATLEEMMTACQGVGGPGHKARVLAEAMSQVTNSAAIMMQRGNFKNQRKMVKCFNCGKEGHVARNCRAPRKKGCWKCGKEGHQMKDCIESQANFLGKIWPSHKGRPGNFLQSRPEPTAPPEESLRSGIETTTPSQKQEPIDKEVYPLTSLRSLFGNDPSSQ

SEQ ID NO: 359 - protein, 500 aa, Human immunodeficiency virus
MGARASVLSGGELDRWEKIRLRPEGKKRYKLKHIVWASRELERFAVNPGLLETSEGCRQILIQLQPSLQTGSEELRSLYYTVATLYCVHQRIEVKDTKEALEKIEEEQNKSKKKAQQAAAGTGNSSQVSQNYPIVRNIQGQMVHQPLSPRTLNAWVKVVEEKAFSPEVIPMFSALSEGATPQDLNTMLNTVGGHQAAMQMLKETINEEAADWDRLHPVHAGPVAPGQMREPRGSDIAGTTSTLQEQIGWMSNNPPIPVGEIYKRWIILGLNKIVRMYSPASILDIRQGPKEPFRDYVDRVYKTLRAEQASQEVKNWMTETLLVQNANPDCKTILKALGPGATLEEMMTACQGVGGPGHKARVLAEAMSQVTNSANIMMQRGNFRNQRKVVKCFNCGKEGHIARNCRAPRKKGCWKCGKEGHQMKDCTERQANFLGKIWPSHKGRPGNFLQSRPEPSAPPEESFRFGEEATTSPQKQELIDKELYPLTSLRSLFGNDPLSQ

SEQ ID NO: 360 - protein, 499 aa, Human immunodeficiency virus
MGARASVLSGGELDKWEKIRLRPGGKKQYKLKHIVWASRELERFAVNPGLLETAEGCKQIIGQLQPSLQTGSEELRSLYNTVAVLYCVHQKIDVKDTKEALEKIEEEQNKSKKKAQQAAADTGNNSKVSQNYPIVQNLQGQMVHQTISPRTLNAWVKVIEEKAFSPEVIPMFSALSEGATPQDLNTMLNTVGGHQAAMQMLKETINEEAAEWDRLHPVHAGPVAPGQMREPRGSDIAGTTSTLQEQIGWMTSNPPIPVGEIYKRWIILGLNKIVRMYSPVSILDIRQGPKEPFRDYVDRFYKTLRAEQASQDVKNWMTETLLVQNANPDCKTILKALGPAATLEEMMTACQGVGGPGHKARVLAEAMSQVTNSATIMMQRNNFRDQRRTVKCFNCGRVGHIAKNCRAPRKRGCWKCGKEGHQMKDCTERQANFLGKIWPSHKGRPGNFLQNRPEPTAPPEESFRFGEETTPPQKQEQIDKEMYPLASLKSLFGNDPLSQ

SEQ ID NO: 361 - protein, 503 aa, Human immunodeficiency virus
  misc_feature (40)..(40): Xaa can be any naturally occurring amino acid
  misc_feature (96)..(96): Xaa can be any naturally occurring amino acid
  misc_feature (114)..(114): Xaa can be any naturally occurring amino acid
  misc_feature (124)..(124): Xaa can be any naturally occurring amino acid
  misc_feature (136)..(136): Xaa can be any naturally occurring amino acid
  misc_feature (198)..(198): Xaa can be any naturally occurring amino acid
  misc_feature (221)..(221): Xaa can be any naturally occurring amino acid
  misc_feature (240)..(240): Xaa can be any naturally occurring amino acid
  misc_feature (335)..(335): Xaa can be any naturally occurring amino acid
  misc_feature (338)..(338): Xaa can be any naturally occurring amino acid
  misc_feature (365)..(365): Xaa can be any naturally occurring amino acid
  misc_feature (377)..(377): Xaa can be any naturally occurring amino acid
  misc_feature (419)..(419): Xaa can be any naturally occurring amino acid
  misc_feature (437)..(437): Xaa can be any naturally occurring amino acid
  misc_feature (453)..(453): Xaa can be any naturally occurring amino acid
  misc_feature (468)..(468): Xaa can be any naturally occurring amino acid
MGARASVLSGGELDRWEKIRLRPGGKKKYRLKHIVWASRXLERFALNPGLLETSGGCRQILGQLQPSLQTGSEEIKSLYNTVATLYCVHQKIEIRXTKEALDKIEEEQNKSKKXAQQAAADAEXSSRQVSQNYPIXQNLQGQMVHQPISPRTLNAWVKVVEEKAFSPEVIPMFTALSEGATPQDLNTMLNIVGGHQAXMQMLKETINEEAAEWDRMHPVHXGPIAPGQMREPRGSDIAGXTSTLQEQIGWMTSNPPIPVGEIYKRWIILGLNKTVRMYSPISILDIRQGPKEPFRDYVDRFYKTLRAEQASQEVKNWMTETLLVQNANPDCRTIXKAXGPAATLEEMMTACQGVGGPGHKARVLXEAMSQVTNSTAXMMQKGNFRNQRKPVKCFNCGREGHIAKNCKAPRKKGCWKCGXEGHQMKDCTERQANFLGXIWSSHKGRPGNFLQSXPEPTAPPEESFRFGXGTITPSQKQEPIEKDKDLYPLASLKSLFGNDPLSQ

SEQ ID NO: 362 - protein, 502 aa, Human immunodeficiency virus
  misc_feature (9)..(9): Xaa can be any naturally occurring amino acid
  misc_feature (11)..(11): Xaa can be any naturally occurring amino acid
  misc_feature (17)..(17): Xaa can be any naturally occurring amino acid
  misc_feature (46)..(46): Xaa can be any naturally occurring amino acid
  misc_feature (100)..(100): Xaa can be any naturally occurring amino acid
  misc_feature (127)..(127): Xaa can be any naturally occurring amino acid
  misc_feature (159)..(159): Xaa can be any naturally occurring amino acid
  misc_feature (181)..(181): Xaa can be any naturally occurring amino acid
  misc_feature (263)..(263): Xaa can be any naturally occurring amino acid
  misc_feature (444)..(444): Xaa can be any naturally occurring amino acid
  misc_feature (449)..(449): Xaa can be any naturally occurring amino acid
  misc_feature (455)..(455): Xaa can be any naturally occurring amino acid
  misc_feature (459)..(459): Xaa can be any naturally occurring amino acid
  misc_feature (462)..(462): Xaa can be any naturally occurring amino acid
MGARASVLXGXDLDRWXKIRLRPGGKKKYRLKHIVWASRELERFAXNPGLLETSGGCRQILQQLQPSLQTGSEELKSLYNTVATLYCVHQRIDVKDTKEXLDKIEEEQSKSKKKVQQAAADAGTSSXSQVSHNYPIVQNLQGQMVHQPISPRTLNAWVXVVEEKAFSPEVIPMFSALSEGXTPQDLNTMLNTVGGHQAAMQMLKETINEEAAEWDRLHPVQAGPVAPGQMRDPRGSDIAGTTSTLQEQIGWMTHNPPIPVGEXYKRWIILGLNKIVRMYSPTSILDIRQGPKEPFRDYVDRFYKTLRAEQASQDVKNWMTETLLVQNANPDCKTILKALGPAATLEEMMTACQGVGGPGHKARVLAEAMSQVNNPTNIMMQRGNFKNQRKPVKCFNCGKEGHIAKNCRAPRRKGCWKCGREGHQMKDCTERQANFLGKIWPSHXGRPGXFLQSRXEPSXPPXESFRFGEEKPTPPQKQEPIDKDLYPLASLRSLFGNDPSSQ

SEQ ID NO: 363 - protein, 499 aa, Human immunodeficiency virus
MGARASVLSGGKLDMWEKIRLRPGGKKQYKLKHIVWASRELERFAINPGLLETSEGCKQILGQLQSSLQTGSEELKSLYNTVAVLYCVHQRIEIKDTKEALDKIEEEQNKSKRKTQQAAADTGNSSQVSQNYPIVQNLQGQMVHQALSPRTLNAWVKVIEEKAFSPEVIPMFTALSEGATPQDLNTMLNTVGGHQAAMQMLKETINEEAAEWDRLHPVHAGPIAPGQMREPRGSDIAGTTSTLQEQIGWMTNNPPIPVGEIYKRWIILGLNKIVRMYSPVSILDIKQGPKEPFRDYVDRFYKTLRAEQATQEVKNWMTETLLVQNANPDCKTILKALGPAATLEEMMTACQGVGGPGHKARVLAEAMSQVTNPTIMMQRGNFRNQRRIIKCFNCGKDGHIAKNCRAPRKKGCWKCGQEGHQMKDCTERQANFLGKLWPSHKGRPGNFLQSRPEPTAPPEESFRFGEEATAPPQKQEPIDQERYPLASLRSLFGNDPLSQ

SEQ ID NO: 364 - protein, 499 aa, Human immunodeficiency virus
  misc_feature (28)..(28): Xaa can be any naturally occurring amino acid
  misc_feature (35)..(35): Xaa can be any naturally occurring amino acid
  misc_feature (71)..(71): Xaa can be any naturally occurring amino acid
  misc_feature (88)..(88): Xaa can be any naturally occurring amino acid
  misc_feature (160)..(160): Xaa can be any naturally occurring amino acid
  misc_feature (425)..(425): Xaa can be any naturally occurring amino acid
  misc_feature (470)..(470): Xaa can be any naturally occurring amino acid
  misc_feature (472)..(472): Xaa can be any naturally occurring amino acid
MGARASVLSAGELDRWERIRLRPGGKKXYRLKHIXWASRELERFAVNPGLLETSEGCRQILGQLQPSLQTXSEELRSLHNTVAVLYCXHQNIEVKDTKEALEKIEEEQKKSQKKAQQAAADTKNNPVSQNYPIVQNMQGQMVHQAISPRTLNAWVKVVEXKAFSPEVIPMFSALSEGATPQDLNTMLNTVGGHQAAMQMLKETINEEAAEWDRLHPVHAGPIAPGQMREPRGSDIAGTTSTLQEQINWMTNNPPIPVGEIYKRWIILGLNKIVRMYSPASILDIKQGPKEPFRDYVDRFYKTLRAEQATQEVKNWMTETLLVQNANPDCKTILKALGPAATLEEMMTACQGVGGPSHKARVLAEAMSQVTNSNTIMMQRGNFRNQRKMVKCFNCGKEGHIARNCRAPRKKGCWKCGKEGHQMKDXTERQANFLGKIWPSHKGRPGNFLQNRPEPSAPPAESFRFGEETTXPXQKQEPIDKELYPSASLRSLFGNDPSSQ

SEQ ID NO: 365 - protein, 501 aa, Human immunodeficiency virus
  misc_feature (127)..(127): Xaa can be any naturally occurring amino acid
  misc_feature (487)..(487): Xaa can be any naturally occurring amino acid
MGARASVLSGGKLDHWEKIRLRPGGKKQYRLKHLVWASRELERFAINPGLLETSEGCRQILGHLQPSLQTGSEELRSLYNAVATLYCVHQRIDVKDTKEALDKIEEEQNESKKRTQPAAAGAGNNSXVSQNYPIVQNLQGQMVHQSLSPRTLNAWVKVVEEKAFSPEVIPMFSALSEGATPQDLNTMLNTVGGHQAAMQMLKETINEEAAEWDRLHPVHAGPIAPGQMREPRGSDIAGTTSTLQEQIGWMTNNPPIPVGEIYKRWIIMGLNKIVRMYSPTSILDIRQGPKEPFRDYVDRFYKTLRAEQASQDVKNWMTETLLVQNANPDCKTILKALGPAATLEEMMTACQGVGGPSHKARVLAEAMSLATNNQATIMMQKGNFKNQRKTIKCFNCGKEGHIARNCRAPRKKGCWKCGKEGHQIKDCTERQANFLGKVWPSRNGRPGNFLQNRPEPSAPPAEGIKFGEETTTPPQKQGPVEEGLYPXASLRSLFGNDPSSQ

SEQ ID NO: 366 - protein, 498 aa, Human immunodeficiency virus
MGARASVISGGELDKWERIRLRQGGSKKYRLKHIVWASRELERYAINPGLLETSEGCRQILGQLQPAIQTGSEELRSLYNTIATLYCVHQKIDVRDTKEALEKIEEEQNKSKKKAQQAAADTKNSSQVSQNYPIVQNLQGQMVHQAISPRTLNAWVKVVEEKAFSPEVIPMFSALSEGATPQDLNTMLNTVGGHQAAMQMLKDTINEEAAEWDRVHPVHAGPIAPGQIREPRGSDIAGTTSTLQEQIAWMTNNPPIPVGEIYKRWIILGLNKIVRMYSPTSILDIRQGPKEPFRDYVDRFYKTLRAEQASQDVKNWMTETLLVQNANPDCKTILKALGPAATLEEMMTACQGVGGPGHKARVLAEAMSQVTNSTAIMMQKGNFRNQRKAVKRFNCGKEGHIARNCRAPRKKGCWKCGKEGHQMKDCTERQANFLGKIWPSHKGRPGNFLQSRPEPTAPPAESFRFGEETTTQKQGPKDKELYPLDSLKSLFGSDPSLQ

SEQ ID NO: 367 - protein, 500 aa, Human immunodeficiency virus
  misc_feature (182)..(182): Xaa can be any naturally occurring amino acid
  misc_feature (202)..(202): Xaa can be any naturally occurring amino acid
  misc_feature (213)..(213): Xaa can be any naturally occurring amino acid
  misc_feature (275)..(275): Xaa can be any naturally occurring amino acid
  misc_feature (304)..(304): Xaa can be any naturally occurring amino acid
  misc_feature (349)..(349): Xaa can be any naturally occurring amino acid
  misc_feature (353)..(353): Xaa can be any naturally occurring amino acid
  misc_feature (389)..(389): Xaa can be any naturally occurring amino acid
MGARASVLSGGKLDQWEKIRLRPGGKKRYELKHIVWASRELERFAVNPGLLETSEGCRQILGQLHPSLPTGSEELKSLYNTVATLYCVHQRIDVKDTKEALDKIEEEQNKSKKKAQQAAADTGNSSQVSQNYPIVQNMQGQMVHQAISPRTLNAWVKVIEEKAFSPEVIPMFTALSEGATPXDLNTMLNTVGGHQAAMQMLXETINEEAAEWXRLHPVHAGPIAPGQMREPRGSDIAGTTSTLQEQIGWMTHNPPIPVGDIYKRWIIMGLNKIVXMYSPTSILDIKQGPKEPFRDYVDRFYKTXRAEQASQEVKNWMTETLLVQNANPDCKTILKALGPAATLEEMMTXCQGXGGPGHKARVLAEAMSQVTNSATIMMQRGNFRNQRKXVKCFNCGKEGHIAKNCRAPRKKGCWKCGKEGHQMKDCIERQANFLGKIWPSHKGRPGNFLQSRPEPTAPPEESFRFVEETTTPSQKPETIDKEVYPLASLKSLFGNDPSSQ

SEQ ID NO: 368 - protein, 506 aa, Human immunodeficiency virus
  misc_feature (225)..(225): Xaa can be any naturally occurring amino acid
  misc_feature (330)..(330): Xaa can be any naturally occurring amino acid
  misc_feature (360)..(360): Xaa can be any naturally occurring amino acid
  misc_feature (441)..(441): Xaa can be any naturally occurring amino acid
  misc_feature (466)..(466): Xaa can be any naturally occurring amino acid
MGARASVLSGGKLDHWEKIRLRPGGKKKYKLKHIVWASRELERFAINPGLLETSEGCRQIIEQLQSALQTGSEELKSLYNTIAVLYCVHQRIEIKDTKEALDKIEEEQTKSKKKAQQAKAADAGNSSTVSVSQNYPIVQNAQGQMVHQPISPRTLNAWVKVVEEKAFSPEVIPMFSALSEGATPQDLNTMLNTVGGHQAAMQMLKETINEEAAEWDRVHPAQAGXVAPGQIRDPRGSDIAGTTSTLQEQIAWMTHNPPIPVGEIYKRWIILGLNKIVRMYSPTSILDIKQGPKEPFRDYVDRFYKTLRAEQASQDVKNWMTETLLVQNAXPDCKTILKALGPAATLEEMMTACQGVGGPXHKARVLAEAMSQVTNSTAAAMMQRGNFRDQRKIVKCFNCGKVGHIAKNCRGPRKKGCWKCGKEGHQMKDCNERQGQANFLXKIWPSHKGRPGNFLQSRPEPTAPPXESFRFGEETTTPSQKQETIDKEMYPLASLKSLFGNDPLSQ

SEQ ID NO: 369 - protein, 500 aa, Human immunodeficiency virus
  misc_feature (15)..(15): Xaa can be any naturally occurring amino acid
  misc_feature (23)..(23): Xaa can be any naturally occurring amino acid
  misc_feature (48)..(48): Xaa can be any naturally occurring amino acid
  misc_feature (61)..(61): Xaa can be any naturally occurring amino acid
  misc_feature (164)..(164): Xaa can be any naturally occurring amino acid
  misc_feature (182)..(182): Xaa can be any naturally occurring amino acid
  misc_feature (223)..(223): Xaa can be any naturally occurring amino acid
  misc_feature (243)..(243): Xaa can be any naturally occurring amino acid
  misc_feature (274)..(274): Xaa can be any naturally occurring amino acid
  misc_feature (370)..(370): Xaa can be any naturally occurring amino acid
  misc_feature (372)..(372): Xaa can be any naturally occurring amino acid
  misc_feature (409)..(409): Xaa can be any naturally occurring amino acid
  misc_feature (460)..(460): Xaa can be any naturally occurring amino acid
  misc_feature (464)..(464): Xaa can be any naturally occurring amino acid
MGARASVLSGGKLDXWEKIRLRXGGKKRYKLKHLVWASRELERFAVNXGLLESSGGCKQIXGQLQPALQTGSEELKSLYNTIVVLYYVHQRIEIRDTKEALDKLEEEQNKCKKKAQQAAADTGNSSQVSQNYPVVQNLQGQMVHQALSPRTLNAWVKVVEEKAXSPEVIPMFSALSEGATPXDLNTMLNTVGGHQAAMQMLKETINEEAAEWDRLHPVHAGPXAPGQMREPRGSDIAGTTSTXQEQIGWMTNNPPIPVGEIYKRWIILGLNKIXRMYSPTSILDIRQGPKEPFRDYVDRFYKTLRAEQASQEVKNWMTETLLVQNANPDCKTILKALGPAATLEEMMTACQGVGGPGHKARVLAEAMSQXTXTPTIMMQKGNFRGQRKIIKCFNCGKEGHLARNCRAPXKRGCWKCGKEGHQMKDCTERQANFLGKAWSSHKGRPGNFLQSRPEPTAPPXESFXFGEETTTPPQRQEPIDKEVYPLASLRSLFGNDPSSQ

SEQ ID NO: 370 - protein, 502 aa, Human immunodeficiency virus
  misc_feature (108)..(108): Xaa can be any naturally occurring amino acid
  misc_feature (176)..(176): Xaa can be any naturally occurring amino acid
  misc_feature (228)..(228): Xaa can be any naturally occurring amino acid
  misc_feature (430)..(430): Xaa can be any naturally occurring amino acid
  misc_feature (467)..(467): Xaa can be any naturally occurring amino acid
  misc_feature (471)..(471): Xaa can be any naturally occurring amino acid
  misc_feature (475)..(475): Xaa can be any naturally occurring amino acid
MGARASILSGGDLDRWEKIRLRPGGKKRYQLKHIIWASRELERFAVNPGLLETSEGCRQILRQLHPSLETGSEELKSLYNTVAVLLCVHQRIEVKDTKEALDKIEEEXNKSKKKAQQAAAADTGNSNPGSGGSQNFPIVQNLQGQMVHQALSPRTLNAWVKVVEEKAFSPEVIPMXTALSEGATPQDLNTMLNTVGGHQAAMQMLKETINEEAAEWDRVHPVHAGPVXPGQMREPRGSDIAGTTSTLQEQIGWMTNNPPIPVGEIYKRWIILGLNKIVRMYSPTSILDIKQGPKEPFRDYVDRFYKTLRAEQASQDVKNWMTETLLVQNANPDCKTILKALGPGATLEEMMTACQGVGGPGHKARVLAEAMSQVTGANTIMMQRGNFKNQRKAVKCFNCGKEGHIARNCRAPRKKGCWKCGREGHQMKDXTERQANFLGKIWPSHKGRPGNFLQNRTEPTAPPEESXRFGXEKTXPPQKQEPKELYPLTSLRSLFGNDPSPQ

SEQ ID NO: 371 - protein, 500 aa, Human immunodeficiency virus
  misc_feature (249)..(249): Xaa can be any naturally occurring amino acid
  misc_feature (435)..(435): Xaa can be any naturally occurring amino acid
MGARASILSGGELDRWEKIRLRPGGKKKYQLKHIVWASRELERFSVNPGLLETSEGCRQILGQLQPALKTGSEEFRSLYNAIAVLYCVHQRIDIKDTKEALDKIEEEQNESKKKAQQAAADTGNNKQVSQNYPIVQNMQGQMVHQAISPRTLNAWVKVIEEKAFSPEVIPMFSALSEGATPGDLNTMLNTVGGHQAAMQMLKETINEEAAEWDRLHPVQAGPVAPGQIREPRGSDIAGTTSTLQEQITXMTSNPPIPVGEIYKRWIILGLNKIVRMYSPTSILDIKQGPKEPFRDYVDRFYKTLRAEQATQEVKNWMTETLLVQNANPDCKTILKALGPGASLEEMMTACQGVGGPAHKARVLAEAMSQVTNSTAIMMQRGNFKNQRKTVKCFNCGKEGHIAKNCRAPRKRGCWKCGKEGHQMKDCTERQANFLXKIWPSHKGRPGNFLQSRPEPSAPPEESFRFGEETTTPPQKQEPTDKEHYPLASLRSLFGNDPLSQ

SEQ ID NO: 372 - protein, 503 aa, Human immunodeficiency virus
MGARASVLSGGELDRWEKIRLRPGGKKKYRLKHLVWASRELERFAVNPGLLETSEGCRQILGQLQPSLQTGSEELKSLYNTIAVLYCVHQRIEVKDTKEALDKIEEEQNKSKKKAQQAAADTGNSSQNSQNYPIVQNIQGQMVHQPISPRTLNAWVKVVEEKAFSPEVIPMFSALSEGATPQDLNTMLNTVGGHQAAMQMLKETINEEAAEWDRLHPVHAGPVAPGQMREPRGSDIAGVTSNLQEQIAWMTSNPPIPVGDIYKKWIIMGLNKIVRMYSPTSILDIRQGPKEPFRDYVDRFYKTLRAEQASQDVKNWMTETLLVQNANPDCKTILKALGPAATLEEMMTACQGVGGPGHKARVLAEAMSQVPGSANIMMQRGNYRNQKKSVKCFNCGKEGHVARNCRAPRKKGCWKCGKEGHQMKDCTERQANFLGKIWPSYKGRPGNFLQNRPEPTAPPEPTAPPEESFRFGEETTTPSQKQGMTDKEMYPLTSLKSLFGNDP

SEQ ID NO: 373 - protein, 507 aa, Human immunodeficiency virus
  misc_feature (17)..(17): Xaa can be any naturally occurring amino acid
MGARASVLSGGKLDAWXKIRLRPGGKKKYRLKHIVWASRELERFAVNPGLLETSEGCRQILGQLQPSLQTGSEELKSLYNTIAVLYCVHQRIEIRDTKEALDKIEEEQNKSKKKAQQAAAAAADTGNSSQTSQNYPIVQNLQGQMVHQALSPRTLNAWVKVVEEKAFSPEVIPMFSALSEGATPQDLNTMLNTVGGHQAAMQMLKETINEEAAEWDRLHPVHAGPVAPGQMREPRGSDIAGTTSTLQEQIGWMTNNPPIPVGEIYKRWIIMGLNKIVRMYSPVSILDIRQGPKEPFRDYVDRFYKTLRAEQASQDVKNWMTETLLVQNANPDCKTILKALGPAATLEEMMTACQGVGGPGHKARVLAEAMSHITNSATVMMQRGTFRNQRKIVKCFNCGKEGHIARNCKAPRKKGCWKCGREGHQMKDCTERQANFLGKIWPSHKGRPGNFLQNRPEPTAPLEPTAPPEESFRRETIAPSQKQEPIDKELYPLASLRSLFGNDPSSQ

SEQ ID NO: 374 - protein, 510 aa, Human immunodeficiency virus
  misc_feature (389)..(389): Xaa can be any naturally occurring amino acid
MGARASILSGGQLDRWEKIRLRPGGKKKYKLKHLVWASRELERFAVNPGLLETLDGCRQILGQLQPALQTGSEEFRSLYNTVATLYCVHGRIEVKDTKEALDKIEEEQNKSKKKAQQAAADTGNSGGNSSQVSQNYPIVQNLQGQMVHQAISPRTLNAWVKVVEEKAFSPEVIPMFTALSEGATPQDLNTMLNTVGGHQAAMQMLKETINEEAAEWDRLHPVQAGPNPPGQMREPRGSDIAGTTSTLQEQIGWMTSNPPIPVGEIYKRWIILGLNKIVRMYSPTSILDIRQGPKEPFRDYVDRFYKTLRAEQASAEVKGWMTETLLVQNANPDCKTILRALGPGATLEEMMTACQGVGGPSHKARVLAEAMGQVTNTAATMMMQKGNFXNQGKIVKCFNCGKTGHIAKNCRAPRKKGCWKCGKEGHQMKDCTERQANFLGKIWPSHKGRPGNFLQSRPEPTAPPAPTAPPAESFRFGEEATAPSQKPETRDELYPLASLKSLFGSDPSSQ

SEQ ID NO: 375 - protein, 497 aa, Human immunodeficiency virus
MGARASVLSGGELDRWEKIRLRPGGNKKYRLKHIVWASRELERFSINPGLLETSEGCRQILQQLQPSLQTGSEELKSLYNTIATLYCVHQRIDIKDTKEALEKVEEEQNKSKQKTQQAAADTRNSSQVSQNYPIVQNLQGQMVHQPLSPRTLNAWVKVVEEKAFSPEVIPMFSALSEGATPQDLNTMLNTVGGHQAAMQMLKETINEEAAEWDRLHPVHAGPVAPGQIREPRGSDIAGTTSTLQEQIAWMTNNPPIPVGEIYKRWIILGLNKIVRMYSPTSILDIRQGPKEPFRDYVDRFYKTLRAEQASQEVKNWMTETLLVQNANPDCKTILKALGPGATLEEMMTACQGVGGPGHKARVLAEAMSQVTGSANVMMQRGNFKSQRKIVKCFNCGKTGHIAKNCRAPRKKGCWKCGKEGHQMKDCNERQANFLGKVWPFHKERPGNFLQSRPEPTAPPEESFRFREETTAPSQKQEPIDKELYPLASLKSLFGNDP

SEQ ID NO: 376 - protein, 513 aa, Human immunodeficiency virus
MGARASVLSGGKLDQWEKIRLRPGGKKKYQLKHIVWASRELERFAVNPGLLETTEGCRQILGQLQPSLQTGSEELKSLYNTVAVLYCVHQRIDIKDTKEALDRIEEEQTKSKKQAQQKQAQQAAADTGSSSNVSQNYPIVQNMQGQLVHQAMSPRTLNAWVKVVEEKAFSPEVIPMFAALSEGATPQDLNTMLNTVGGHQAAMQMLKETINEEAAEWDRLHPIHAGPAAPGQMREPRGSDIAGTTSTLQEQIGWMTSNPPIQVGEIYKRWIILGLNKIVRMYSPTSILDIRQGPKEPFRDYVDRFYKTLRAEQASQEVKNWMTETLLVQNANPDCKTILKALGPAATLEEMMTACQGVGGPGHKARVLAEAMSQVNAATVMMQRGNFRSQRKIVKCFNCGKDGHIARNCKAPRRKGCWKCGKEGHQMKDCNNERQANFLGKIWPSHKGRPGNFLQNRPEPTAPSRTEPTAPPEESFRFGEETATSSQKQEPIDKGLYPLASLRSLFGNDPLSQ

SEQ ID NO: 377 - protein, 500 aa, Human immunodeficiency virus
MGARASVLSGGELDKWEKIRLRPGGKKKYRLKHIVWASRELERFAVNPGLLETSEGCRQILGQLQPSIKTGSEELKSLFNTVAVLYCVHQRIEVKDTKEALEKIEEEQNKCKKKVQQAAADTGNSSQVSQNFPIVQNMQGQMVHQAISPRTLNAWVKVVEEKAFSPEVIPMFSALSEGATPQDLNTMLNTVGGHQAAMQMLKETINEEAAEWDRLHPVQAGPIAPGQIREPRGSDIAGTTSTLQEQIAWMTNNPPIPVGEIYKRWIIMGLNKIVRMYSPTSILDIRQGPKEPFRDYVDRFYKTLRAEQASQEVKNWMTETLLVQNANPDCKTILKALGPAATLEEMMTACQGVGGPGHKARVLAEAMSQVTNSATIMMQKGNFRNQRKSVKCFNCGKEGHIARNCRAPRKKGCWKCGKEGHQMKDCTERQANFLGKIWPSHKGRPGNFLQSRPEPSAPPEESFRFGEETTTPPQKQESKDKELYPLTSLKSLFGSDPSLQ

SEQ ID NO: 378 - protein, 505 aa, Human immunodeficiency virus
MGARASVLSGGKLDRWEKIRLRPGGKKKYKLKHIVWASRELERFAVNPGLLETAEGCRQILGQLQPSLQTGSEELKSLFNTVATLYCVHQNIEVKDTKEALDKVEEEQNKSKKKAQQAAADTGNNSQVSQNYPIVQNLQGQMVHQALSPRTLNAWVKVVEEKNFSPEVIPMFTALSEGATPQDLNTMLNTVGGHQAAMQMLKETINEEAAEWDRLHPVQAGPVAPGQIREPRGSDIAGTTSNLQEQIAWMTHNPPIPVGEIYKRWIILGLNKIVRMYSPTSILDIKQGPKEPFRDYVDRFYKTLRAEQASQDVKNWMTETLLVQNANPDCRTILKALGPAATLEEMMAACQGVGGPGHKARVLAEAMSQVTNSATIMMQKGNFRGQRKIVKCFNCGKEGHIAKNCRAPRKRGCWKCGKEGHQMKDCTERQANFLGKIWPSSKGRPGNFLQSRPEPTAPTAPTAPPEESFRFGEEMTPSQKQERIDKEPSPLASLRSLFGSDPSSQ

SEQ ID NO: 379 - protein, 510 aa, Human immunodeficiency virus
  misc_feature (247)..(247): Xaa can be any naturally occurring amino acid
MGARASVLSGGELDRWERIRLRPGGNKRYKLKHIVWASRELERFAVNPGLLETSDGCRQILTQLQPSLQTGSEELKSLYNTVATLYCVHQRIEIKDTKEALDKIEEEQNKSKQKAQQAAAAAAADTGNSSQVSQNYPIVQNLQGQMVHQPIAARTLNAWVKVVEEKAFSPEVIPMFTALSEGATPQDLNTMLNTVGGHQAAMQMLKETINEEAAEWDRLHPVHAGPVAPGQLREPRGSDIAGTTSTXQEQIGWMTNNPPIPVGEIYKRWIVLGLNKIVRMYSPTSILDIKQGPKESFRDYVDRFYKTLRAEQASQEVKNWMTETLLVQNANPDCKTILKALGPGATLEEMMTACQGVGGPSHKARVLAEAMSQATNSSAIMMQKGNFRNQRKTVKCFNCGKEGHIARNCRAPRKKGCWKCGKEGHQMKDCTSGQANFLGRLWPSHKGRPGNFLQSRPEPTAPTAPPEESFRFVEETATPSQKQEKQEPIDREMYPLASLRSLFGNDPSSQ

SEQ ID NO: 380 - protein, 502 aa, Human immunodeficiency virus
  misc_feature (59)..(59): Xaa can be any naturally occurring amino acid
  misc_feature (102)..(102): Xaa can be any naturally occurring amino acid
  misc_feature (129)..(130): Xaa can be any naturally occurring amino acid
  misc_feature (133)..(133): Xaa can be any naturally occurring amino acid
  misc_feature (144)..(144): Xaa can be any naturally occurring amino acid
  misc_feature (437)..(437): Xaa can be any naturally occurring amino acid
  misc_feature (445)..(445): Xaa can be any naturally occurring amino acid
  misc_feature (466)..(466): Xaa can be any naturally occurring amino acid
MGARASVLSGGKLDRWEKIRLRPGGKKKYQLKHLVWASRELERFAVNPGLLESSEGCKXILIQLQPSLQTGSEELKSLYNTVATLYCVHQGIEIKDTKEALXKIEEEQNKSKKKAQQAAAAAADTGNSXXVSXNYPIVQNLQGXMVHQAISPRTLNAWVKVVEEKAFSPEVIPMFSALAEGATPQDLNTMLNTVGGHQAAMQMLKETINEEAAEWDRLHPVHAGPIAPGQMREPRGSDIAGTTSNLQEQIAWMTNNPPIPVGEIYKRWIILGLNKIVRMYSPVSILDIRQGPKEPFRDYVDRFYKTLRAEQASQDVKNWMTETLLVQNANPDCKTILKALGPAATLEEMMTACQGVGGPSHKARVLAEAMSQTNSASIMMQRGNFRSHKKTIKCFNCGKEGHIASKCRAPRKRGCWKCGKEGHQMKDCTERQANFLXKIWPPYKXRPGNFLQSRPEPTAPPEESFXFGEGTTTPPQKQEPIDKELYPLTSLKSLFGNDPSSQ

SEQ ID NO: 381 - protein, 505 aa, Human immunodeficiency virus
  misc_feature (424)..(424): Xaa can be any naturally occurring amino acid
  misc_feature (435)..(435): Xaa can be any naturally occurring amino acid
  misc_feature (447)..(447): Xaa can be any naturally occurring amino acid
MGARASVLSGGGLDRWEKIRLRPGGKKKYRLKHIVWASRELERFAVNPALLESSGGCRQILQQLQPSLQTGSEELKSLFNTVAVLYCVHQRIDVKDTKEALDKIEEEQNKSKKKAQQAAADAADTGNSSSQVSQNYPIVQNLQGQMVHQALSPRTLNAWVKVVEEKAFSPEVIPMFTALSEGATPQDLNTMLNTVGGHQAAMQMLKETINEEAAEWDRLHPVHAGPIAPGQMREPRGSDIAGTTSTLQEQIGWMTHNPPIPVGEIYKRWIILGLNKIVRMYSPVSILDIRQGPKEPFRDYVDRFYKTLRAEQASQDVKNWMTETLLVQNANPDCKTILKALGPAATLEEMMTACQGVGGPGHKARVLAEAMGQVNSGAIMMQKGNFKSQRRNVKCFNCGKEGHIARNCRAPRKRGCWKCGKEGXQMKDCTERQAXFLGKLWPSHKGXPGNFPQSRPEPTAPPPPAESFRFGEEMTTPAQKQEPIDKETYPLASLRSLFGNDPSSQ

SEQ ID NO: 382 - protein, 500 aa, Human immunodeficiency virus
MGARASVLSGGKLDSWEKIRLRPGGKKKYKLKHIVWASRELERFAVNPSLLETSEGCRQIIGQLQPSLQTGSEELKSLYNTVATLYCVHQRIEVKDTKEALDKIEEEQNKSKKRAQLAAADTGSSSKVSQNYPIVQNIQGQMVHQPISPRTLNAWVKVVEEKAFSPEVIPMFSALAEGATPQDLNTMLNTVGGHQAAMQMLKETINEEAAEWDRLHPVHAGPIAPGQMREPRGSDIAGTTSTLQEQIAWMTNNPPIPVGEIYKRWIILGLNKIVRMYSPVSILDIRQGPKEPFRDYVDRFYKTLRAEQASQDVKNWMTETLLVQNANPDCKTILKALGPGATLEEMMTACQGVGGPSHKARVLAEAMSLATNSNTIMMQRGNFKNQRKIVKCFNCGKEGHIAKNCRAPRKKGCWKCGREGHQMKDCTERQANFLGKIWPSHKGRPGNFLQSRPEPTAPPEESFRFGEETASPPQKQDQTDKELYPLASLKSLFGSDPSSQ

SEQ ID NO: 383 - protein, 497 aa, Human immunodeficiency virus
  misc_feature (31)..(31): Xaa can be any naturally occurring amino acid
  misc_feature (88)..(88): Xaa can be any naturally occurring amino acid
  misc_feature (138)..(138): Xaa can be any naturally occurring amino acid
MGARASVLSGGELDRWEKIRLRPMGRKKYRXKHIVWASRELERFAVNPGLLETSEGCRQILAQLQPALQTGSEELRSLFNTVATLYCXHQRIDVKDTKEALEKIEEEQNKSKKKAQQAAADTGNSSQVSQNYPIVQNXQGQMVHQAISPRTLNAWVKVIEEKAFSPEVIPMFSALSEGATPQDLNTMLNTVGGHQAAMQMLKETINEEAAEWDRVHPVHAGPAAPGQMREPRGSDIAGTTSTLQEQIGWMTSNPPIPVGEIYKRWIILGLNKIVRMYSPISILDIRQGPKEPFRDYVDRFYKTLRAEQASQDVKNWMTETLLVQNANPDCKTILKALGPAATLEEMMTACQGVGGPSHKARILAEAMSQVTNSATIMMQKGNFRNQRRTVKCFNCGKEGHIARNCRAPRKKGCWKCGKEGHQMKDCTERQANFLGKIWPSHKGRPGNFLQSRPEPTAPPAESFRFGEETTTPPPKQEQVDNPLASLKSLFGNDPLSQ

SEQ ID NO: 384 - protein, 500 aa, Human immunodeficiency virus
  misc_feature (46)..(46): Xaa can be any naturally occurring amino acid
  misc_feature (57)..(57): Xaa can be any naturally occurring amino acid
  misc_feature (225)..(225): Xaa can be any naturally occurring amino acid
  misc_feature (228)..(228): Xaa can be any naturally occurring amino acid
  misc_feature (388)..(388): Xaa can be any naturally occurring amino acid
  misc_feature (446)..(446): Xaa can be any naturally occurring amino acid
  misc_feature (486)..(486): Xaa can be any naturally occurring amino acid
MGARASVLSGGELDRWEKIRLRPGGKKKYRLKHIVWASRELERFAXNPGLLETSTGXRQILGQLQPSLQTGSEELKSLYNTVATLYCVHQKIEIRDTKEALDKIEEEQNKSKKKAQQAAADTGSSSQVSQNYPIVQNLQGQMVHQAISPRTLNAWVKVIEEKAFSPEVIPMFAALSEGATPQDLNTMLNTVGGHQAAMQMLKETINEEAAEWDRLHPVHAGPIAXGQXREPRGSDIAGTTSTLQEQIGWMTHNPPIPVGEIYKKWIIMGLNKIVRMYSPVSILDIRQGPKEPFRDYVDRFYKTLRAEQATQEVKNWMTETLLVQNANPDCKTILKALGPAATLEEMMTACQGVGGPGHKARVLAEAMSQATNSVSIMMQKGNFRGQKXTVKCFNCGKEGHIAKNCRAPRKKGCWKCGREGHQMKDCTERQANFLGKIWPSHKGRPXNFLQNRTEPTAPPAESFGFGEETTTPPQKQEKIDKELYPXASLKSLFGNDQSSQ

SEQ ID NO: 385 - protein, 505 aa, Human immunodeficiency virus
MGARASILSGGELDRWEKIRLRPGGKKKYKLKHIVWASRELERFSINPGLLETSEGCRQILGQLHPSLQTGSEELKSLYNAIAVLFCVHQRIEVKDTKEALEKVEEEQNKSKKKAQQAAADTGNSSHTGNSSQVSQNYPIVQNIQGQMVHQALSPRTLNAWVKVIEEKAFSPEVIPMFSALSEGATPQDLNTMLNTVGGHQAAMQMLKETINEEAAEWDRLHPPQAGPVAPGQMRDPRGSDIAGTTSTLQEQIGWMTSNPPIPVGEIYKRWIIMGLNKIVRMYSPVSILDIRQGPKEPFRDYVDRFYKTLRAEQASQEVKNWMTETLLVQNANPDCKTILKALGPGATLEEMMTACQGVGGPGHKARVLAEAMSQVTNAGNIMMQKGNFRNQRKIVKCFNCGKEGHIAKNCRAPRKKGCWKCGKEGHQMKDCAERQANFLGKIWPSHKGRPGNFLQNRPEPTAPPEESFRFGEETTTPSQKQEVDKELYPLSSLKSLFGSDPSSQ

SEQ ID NO: 386 - protein, 500 aa, Human immunodeficiency virus
MGARASVLSGGELDRWEKIRLRPGGKKKYKLKHIVWASRELERFAVNPGLLETSGGCRQILEQLQPSLQTGSEELKSLFNTVAVLYCVHQRIEIKDTKEAIDKIEEEKAKSKKKAQQTAAAATGNSSQVSQNYPIVQNMQGQMVHQPISPRTLNAWVKVVEEKAFSPEVIPMFAALSEGATPQDLNTMLNTVGGHQAAMQMLKETINEEAAEWDRLHPVHAGPIAPGQMREPRGSDIAGTTSTLQEQIGWMTSNPPIQVGEVYKRWIILGLNKIVRMYSPTSILDIRQGPKEPFRDYVDRFYKTLRAEQASQEVKNWMTETLLVQNANPDCKTILKALGPAATLEEMMTACQGVGGPGHKARVLAEAMSQVNSATVMMQRGNFRNKRQTVKCFNCGKEGHIARNCKAPRKKGCWKCGKEGHQMKDCTERQANFLGKIWPSHKGRPGNFLQSRPEPTAPPAESFRFGEETTTPSQKQEPIDKELYPLASLKSLFGNDPSSQ

SEQ ID NO: 387 - protein, 500 aa, Human immunodeficiency virus
  misc_feature (133)..(133): Xaa can be any naturally occurring amino acid
  misc_feature (186)..(186): Xaa can be any naturally occurring amino acid
  misc_feature (298)..(298): Xaa can be any naturally occurring amino acid
MGARASVLSGGELDKWEKIRLRPGGKKQYKLKHIVWASRELERFALNPGLLETSDGCRQILAQLQPSLQTGTEEIRSLYNTVATLYCVHQRIEVKDTKEALEKIEEEQNKSKKKEQQAAAGTGNSSQVSQNYXIVQNIQGQMVHQPLTPRTLNAWVKVVEEKSFSPEVIPMFTALSEGATPQDLNXMLNTVGGHQAAMQMLKETINEEAAEWDRLHPPQAGPIAPGQIREPRGSDIAGTTSNLQEQITWMTSNPPIPVGEIYKRWIILGLNKIVRMYSPTSILDIKQGPKEPFRDYVXRFYKTLRAEQASQDVKNWMTETLLVQNANPDCKTILKALGPGASLEEMMTACQGVGGPSHKARVLAEAMSQATNSANIMMQRGNFRNTRKTVKCFNCGKEGHIARNCRAPRKKGCWKCGQEGHQMKDCTERQANFLGKIWPSHKGRPGNFLQSRLEPTAPPEESLRFREETTTPSQKQEPTDKELYPLASLRSLFGNDPSSQ

SEQ ID NO: 388 - protein, 503 aa, Human immunodeficiency virus
  misc_feature (332)..(332): Xaa can be any naturally occurring amino acid
MGARASVLSGGELDRWEKIRLRPGGKKQYRLKHLVWASRELERFAVNPSLLETSEGCRQILGQLQPALQTGSEELKSLYNTIATLYCVHQRIDVKDTKEALDKIEEEQNKSKKKAQQAQQAAAADTGNSSQVSQNYPIVQNLQGQMVHQALSPRTLNAWVKVVEEKAFSPEVIPMFTALSEGATPQDLNTMLNTVGGHQAAMQMLKETINEEAAEWDRLHPVQAGPIPPGQIREPRGSDIAGTTSTLQEQITWMTNNPPIPVGEIYKRWIILGLNKIVRMYSPVSILDIRQGPKEPFRDYVDRFYKTLRAEQASQDVKNWMTETLLVQNANXDCKTILKALGPACTLEEMMTACQGVGGPGHKARVLAEAMSQATHTAILMQRGNFKNQRKSVKCFNCGKEGHIARNCRAPRKKGCWKCGKEGHQMKDCTERQANFLGKIWPSHKGRPGNFLQSRPEPTAPPEESFRFGEEMPAPSQKQEPIDKELYPSAALRSLFGNDPLSQ

SEQ ID NO: 389 - protein, 504 aa, Human immunodeficiency virus
  misc_feature (393)..(393): Xaa can be any naturally occurring amino acid
  misc_feature (399)..(399): Xaa can be any naturally occurring amino acid
  misc_feature (410)..(410): Xaa can be any naturally occurring amino acid
  misc_feature (420)..(420): Xaa can be any naturally occurring amino acid
MGARASVLSGGELDRWEKIRLRPGGKKKYKLKHIVWASRELERFAVNPGLLETSEGCRQILGQLQPSLQTGSEELKSLFNTVAVLYCVHQKIEIKDTKEALDKIEEEQNKSKKKAQQAAAAADTGNNSQVSQNYPIVQNLQGQMVHQAISPRTLNAWVKVIEEKAFSPEVIPMFTALSEGATPQDLNTMLNTVGGHQAAMQMLKETINEEAAEWDRVHPVHAGPIAPGQMREPRGSDIAGTTSTLQEQIGWMTSNPPIPVGEIYKRWIILGLNKIVRMYSPVSILDIKQGPKEPFRDYVDRFYKTLRAEQASQDVKNWMTETLLVQNANPDCKTILKALGPAATLEEMMTACQGVGGPGHKARVLAEAMSQVTNSASAAIMMQRGNFRNQRKXVKCFNXGKEGHIAKNCXAPRKKGCWKXGREGHQMKDCTERQANFLGKIWPSHKGRPGNFLQSRPEPSAPPEESFRFGEETTTPSQKQEPRDKEMYPLASLRSLFGNDPLSQ

SEQ ID NO: 390 - protein, 499 aa, Human immunodeficiency virus
  misc_feature (13)..(13): Xaa can be any naturally occurring amino acid
  misc_feature (119)..(119): Xaa can be any naturally occurring amino acid
  misc_feature (179)..(179): Xaa can be any naturally occurring amino acid
  misc_feature (407)..(407): Xaa can be any naturally occurring amino acid
  misc_feature (411)..(411): Xaa can be any naturally occurring amino acid
  misc_feature (467)..(467): Xaa can be any naturally occurring amino acid
  misc_feature (481)..(481): Xaa can be any naturally occurring amino acid
MGARASVLSGGKXDKWEKIRLRPGGKKKYKLKHIVWASRELERFAVNPGLLETSEGCRQILKQLQPSLETGSEELKSLYNTVAVLYCVHQRIEIRDTKEALDKIEEEQNKSKKEAQQTXAAGTGNSSQVSQNYPIVQNMQGQMVHQAISPRTLNAWVKVVEEKAFSPEVIPMFSALSEXATPQDLNTMLNTVGGHQAAMQMLKETINEEAAEWDRLHPAQAGPVAPGQVREPRGSDIAGTTSTLQEQIAWMTHNPPIPVGEIYKRWIILGLNKIVRMYSPTSILDIKQGPKEPFRDYVDRFYKTLRAEQSSQEVKNWMTETLLVQNANPDCKTILKALGPAATLEEMMTACQGVGGPAHKARVLAEAMSQATNSPAIMMQRGNFRNQRKIIKCFNCGKEGHLARNCXAPRXKGCWKCGKEGHQMKDCNNERQANFLGKIWPSCKGRPGNFLQSRPEPSAPPEESLRXGEETTTPSQKQESXDKEKYPLASLKSLFGNDP

SEQ ID NO: 391 - protein, 502 aa, Human immunodeficiency virus
  misc_feature (44)..(44): Xaa can be any naturally occurring amino acid
  misc_feature (55)..(55): Xaa can be any naturally occurring amino acid
  misc_feature (59)..(59): Xaa can be any naturally occurring amino acid
  misc_feature (63)..(63): Xaa can be any naturally occurring amino acid
  misc_feature (110)..(110): Xaa can be any naturally occurring amino acid
  misc_feature (117)..(117): Xaa can be any naturally occurring amino acid
  misc_feature (127)..(127): Xaa can be any naturally occurring amino acid
  misc_feature (158)..(158): Xaa can be any naturally occurring amino acid
  misc_feature (263)..(263): Xaa can be any naturally occurring amino acid
  misc_feature (294)..(294): Xaa can be any naturally occurring amino acid
  misc_feature (297)..(297): Xaa can be any naturally occurring amino acid
  misc_feature (329)..(329): Xaa can be any naturally occurring amino acid
  misc_feature (333)..(333): Xaa can be any naturally occurring amino acid
  misc_feature (359)..(359): Xaa can be any naturally occurring amino acid
  misc_feature (375)..(375): Xaa can be any naturally occurring amino acid
MGARASVLSGGELDKWEKIRLRPGGKKQYKLKHIVWASRELERXAVNPGLLETAXGCRXILGXLHPSLQTGSEELRSLYNTVAVLYCVHQRIDVKDTKEALDKIEEEQNXSKKKAQXAAADTGNSSXSHVSQNYPIVQNLQGQMVHQAISPRTLNAWXKVIEEKAFSPEVIPMFSALSEGATPQDLNTMLNTVGGHQAAMQMLKETINEEAAEWDRLHPVHAGPIAPGQMREPRGSDIAGTTSTLQEQIGWMTNNPPIPVGEXYKRWIILGLNKIVRMYSPVSILDIRQGPKEXFRXYVDRFYKTLRAEQATQEVKNWMTETLLVQNSXPDCXTILKALGPAATLEEMMTACQGVGGPXHKARVLAEAMSQATNXAAIMMQRGNFRNQRKPIKCFNCGKEGHVARNCKAPRKKGCWKCGREGHQMKDCNERQANFLGKIWPSHKGRPGNFLQSRPEPSAPPEESFRFGEETATPSQKQEPIDKDLYPSASLRSLFGNDHSSQ

SEQ ID NO: 392 - protein, 500 aa, Human immunodeficiency virus
MGARASVLSGGELDRWEKIRLRPGGKKKYKLKHIVWASRELERFAVNPGLLETSDGCRQILGQLQPALQTGSEELKSLFNTVATLYCVHQKIDVKDTKEALDKIEEEQNKSKKKVQQAAADTGNSSQVSQNYPIVQNMQGQMVHQPLSPRTLNAWVKVVEEKAFSPEVIPMFTALSEGATPQDLNTMLNTVGGHQAAMQMLKETINEEAAEWNRLHPVHAGPVAPGQMREPRGSDIAGTTSNLQEQIGWMTNNPPIPVGEIYKRWIILGLNKIVRMYSPTSILDIKQGPKEPFRDYVDRFYKTLRAEQASQDVKNWMTETLLVQNANPDCKTILKALGPAATLEEMMTACQGVGGPGHKARVLAEAMSQVTNSAAVMMQKGNFRNQRKTVKCFNCGKEGHIARNCRAPRKRGCWKCGKEGHQMKDCTERQANFLGKIWPSQKGRPGNFLQSRPEPTAPPEESFRFGEEITAPSQKQELRDKEQHPLTSLRSLFGNDPLSQ

SEQ ID NO: 393 - protein, 500 aa, Human immunodeficiency virus
  misc_feature (72)..(72): Xaa can be any naturally occurring amino acid
MGARASILSGGELDRWEKIRLRPGGKKKYRLKHIVWASRELERFAVNPGLLETSEGCRQILGQLQPSLQTGXEELRSLFNTVATLYCVHQKIDVKDTKEALEKIEEEQNKSKKKAQQVAADTGSNSQVSQNYPIVQNLQGQMVHQPISPRTLNAWVKVVEEKAFSPEVIPMFSALSEGATPQDLNTMLNTVGGHQAAMQMLKETINEEAAEWDRLHPVHAGPIAPGQMREPRGSDIAGTTSNLQEQIAWMTNNPPIPVGDIYKRWIIMGLNKVVKMYSPTSILDIRQGPKEPFRDYVDRFYKTLRAEQASPEVKNWMTETLLVQNANPDCKTILKALGPAATLEEMMTACQGVGGPGHKARVLAEAMSQVTSSATIMMQKGNFRNQRKIVKCFNCGKEGHIARNCRAPRKKGCWKCGKEGHQMKDCTERQANFLGKIWPSHKGRPGNFLQSRPEPTAPPEESFRFGEETTTPSQKQEPIDKELYPLASLRSLFGNDPSSQ

SEQ ID NO: 394 - protein, 500 aa, Human immunodeficiency virus
MGARASVLSGGKLDKWEKIQLRPGGRKKYKLKHIVWASRELERFAVNPGLLETSEGCRQILGQLQPALQTGTEELRSLYNTVATLYCVHQRIEVKDTKEALEKIEEEQNKSKKKAQQVAADTGNSSQVSQNYPIVQNIQGQMVHQAISPRTLNAWVKVVEEKAFSPEVIPMFSALSEGATPQDLNTMLNTVGGHQAAMQMLKETINEEAAEWDRLHPVHAGPIAPGQMREPRGSDIAGTTSTLQEQIGWMTNNPPIPVGEIYKRWIILGLNKIVRMYSPTSILDIKQGPKEPFRDYVDRFYKTLRAEQASQEVKNWMTETLLVQNANPDCKTILKALGPAATLEEMMTACQGVGGPGHKARVLAEAMSQVTNSATIMMQKGNFRNQRKIVKCFNCGKEGHIARNCRAPRKKGCWKCGKEGHQMKDCTERQANFLGKIWPSHKGRPGNFLQSRPEPTAPPEECFRFGEETTTPSQKQEPIDKELYPLTSLRSLFGNDPLSQ

SEQ ID NO: 395 - protein, 505 aa, Human immunodeficiency virus
  misc_feature (48)..(48): Xaa can be any naturally occurring amino acid
  misc_feature (267)..(267): Xaa can be any naturally occurring amino acid
  misc_feature (392)..(392): Xaa can be any naturally occurring amino acid
  misc_feature (436)..(436): Xaa can be any naturally occurring amino acid
MGARASILSGGELDKWERIRLRPGGKKKYKLKHLVWASRELERFAVNXGLLETAEGCRQILIGLQPSLQTGSEEFKSVYNTVATLYCVHQKIEIKDTKEALDKIEEEQNKSKKKAQQAAADTGNKGQVSQNYPIVQNLQGQMVHQAISPRTLNAWVKVVEEKAFSPEVIPMFSALSEGATPQDLNTMLNTVGGHQAAMQMLKETINEEAAEWDRLHPVHAGPVAPGQMREPRGSDIAGTTSTLQEQIGWMTNNPPIPVGEIYKRWIXMGLNKIVRMYSPTSILDIKQGPKEPFRDYVDRFYRTLRAEQASQEVKNWMTETLLVQNANPDCKTILKALGPAATLEEMMTACQGVGGPAHKARVLAEAMSQVTNSANVMMQRGNFKNQRKIVKXFNCGKEGHIAKNCRAPRKKGCWKCGKEGHQMKDCTERQANFLGXIWPSHKGRPGNFLQNRPEPTAPPAPPEESFRFGEETATPPQKQEQIDRDRDLYPLASLRSLFGNDPSSQ

SEQ ID NO: 396 - protein, 500 aa, Human immunodeficiency virus
MGARASVLSGGELDRWEKIRLRPGGKKKYQLKHIVWASRELERYAVNPGLLETSEGCRQILGQLQPALHTGSEGFRSLYNTIAVLYCVHQKIEIKDTKEALDKIEEEQNKCKKKAQQAADTGNSNPVSQNYPIVQNLQGQMVHQPISPRTLNAWVKVVEEKAFSPEVIPMFAALSEGATPQDLNTMLNTVGGHQAAMQMLKETINEEAAEWDRLHPVQAGPVAPGQMREPRGSDIAGTTSTLQEQIGWMTHNPPIPVGEIYKKWIIMGLNKIVRMYSPTSILDIRQGPKEPFRDYVDRFYKTLRAEQASQEVKNWMTETLLVQNANPDCKTILKALGPGATLEEMMTACQGVGGPGHKARVLAEAMSQATNSAAIMMMQKGNGRNQRKGVKCFNCGKEGHIARNCRAPRKKGCWKCGKEGHQMKDCTERQANFLGKIWPSHKGRPGNFLQNRPEPTAPPEESFRFGGETATPSQKQEPRDKELYPLTSLRSLFGNDPSSQ

SEQ ID NO: 397 - protein, 502 aa, Human immunodeficiency virus
  misc_feature (112)..(112): Xaa can be any naturally occurring amino acid
  misc_feature (118)..(118): Xaa can be any naturally occurring amino acid
  misc_feature (380)..(380): Xaa can be any naturally occurring amino acid
MGARASVLSGGKLDRWEKIRLRPGGKKKYKLKHIVWASRELERFAVNPGLLETSAGCRQILEQLQPALQTGTEELRSLYNTIATLYCVHQQIDVKDTKEALEKIEEEQNKSXKKAQQXAADTGNSSQVSQNYPIVQNLQGQMVHQTISPRTLNAWVKVIEEKAFSPEVIPMFSALSEGATPQDLNTMLNTVGGHQAAMQMLKETINDEAAEWDRLHPVHAGPIAPGQMREPRGSDIAGTTSTLQEQIGWMTNNPPIPVGEIYKRWIILGLNKIVRMYSPISILDIKQGPKEPFRDYVDRFYKTLRAEQATQEVKNWMTETLLVQNANPDCKTMLKALGPAATLEEMMTACQGVGGPAHKARVLAEAMSQVTNPGTIMVQXGNFRNQRKTVKCFNCGKEGHIARNCRAPRKRGCWKCGKEGHQMKDCTERQANFLGKIWPSHKGRPGNFFQSRPEPTAPPEESFRFGEETTTPSQKQELIDKDKEQYPLASLRSLFGNDPSSQ

SEQ ID NO: 398 - protein, 506 aa, Human immunodeficiency virus
MGARASVLSGGELDRWEKIRLRPGSKKKYQLKHIVWASRELERFAVNPGLLETSDGCRQILGQLQPALQTGSEELRALYNTVATLYCVHQRIEVKDTKEALDKIEEEQNKSKRAQQAQQAAAAAADTGSSSSVSQNYPIVQNLQGQMVHQAISPRTLNAWVKVVEEKAFSPEVIPMFSALSEGATPQDLNTMLNTVGGHQAAMQMLKETINEEAAEWDRLHPVHAGPIAPGQMREPRGSDIAGTTSNLQEQIGWMTNNPPIPVGEIYKRWIILGLNKIVRMYSPTSILDIRQGPKEPFRDYVDRFYKTLRAEQASQEVKNWMTETLLVQNANPDCKTILKALGPAATLEEMMTACQGVGGPGHKAKILAEAMSQVTNAATIMMTQKGNFRNQRKIVKCFNCGKEGHIARNCRAPRKRGCWKCGKEGHQMKDCTERQANFLGKIWPSHKGRPGNFLQSRPEPTAPPEESFRFGEETITPSQKQEVMDKEVYPLTSLRSLFGNDPSSQ

SEQ ID NO: 399 - protein, 503 aa, Human immunodeficiency virus
  misc_feature (322)..(322): Xaa can be any naturally occurring amino acid
  misc_feature (496)..(496): Xaa can be any naturally occurring amino acid
MGARASILSGGELDRWEKIRLRPGGKKRYRLKHLVWASRELERFAVNPGLLETSEGCRQILGQLQPSLQTGSEELKSLFNTVATLYCVHQKIDVKDTKEALEKIEEEQNKSKKKAQPAAADTGKSSQVSQNYPIVQNLQGQMVHQAISPRTLNAWVKVVEEKAFSPEVIPMFSALSEGATPQDLNTMLNTVGGHQAAMQMLKETINEEAAEWDRVHPVHAGPIAPGQMREPRGSDIAGTTSTLQEQIGWMTNNPPIPVGEIYKRWIIMGLHKIVRMYSPTSILDIRQGPKEPFRDYVDRFYKTLRAEQASQEVKNWMTETLXVQNANPDCKTILKALGPAATLEEMMTACQGVGGPGHKARVLAEAMSQVTNSANIMMQKSSFRSPRKIVKCFNCGKEGHIARNCRAARKKGCWKCGKEGHQMKDCTERQANFLGKIWPSHKGRPGNFLQNRSEPTAPLEPTAPPAESFRFGEETTTPPQTQQPIEKELYPLTSLXSLFGNDP

SEQ ID NO: 400 - protein, 501 aa, Human immunodeficiency virus
MGARASVLSGGKLDKWEKIRLRPGGKKRYQLKHIVWASRELERFALNPGLLETSEGCRQILGQLQPALQTGTEELKSLFNTVATLYCVHQGIEVKDTKEALEKIEEEQNKSKKKAQQAAADTGNSSQVSQNYPIVQNLQGQMVHQALSPRTLNAWVKVVEEKAFSPEVIPMFSALSEGATPQDLNTMLNTVGGHQAAMQMLKETINEEAAEWDRLHPLHAGPIAPGQMREPRGSDIAGTTSTLQEQIGWMTNNPPIPVGEIYKRWIILGLNKIVRMYSPTSILDIKQGPKEPFRDYVDRFYKTLRAEQASQEVKNWMTETLLVQNANPDCKTILKALGPAATLEEMMTACQGVGGPSHKARVLAEAMTQVTKPAATMMVQRGNFRNQRKIVKCFNCGKEGHIARNCRAPRKKGCWKCGKEGHQMKDCTERQANFLGKIWPSCKGRPGNFLQSRPEPTAPPEESFRFGEETTNPSQKQEPIDKELYPLTSLRSLFGNDPSSQ

SEQ ID NO: 401 - protein, 499 aa, Human immunodeficiency virus
  misc_feature (6)..(6): Xaa can be any naturally occurring amino acid
  misc_feature (91)..(91): Xaa can be any naturally occurring amino acid
  misc_feature (115)..(115): Xaa can be any naturally occurring amino acid
  misc_feature (159)..(159): Xaa can be any naturally occurring amino acid
  misc_feature (163)..(163): Xaa can be any naturally occurring amino acid
  misc_feature (193)..(193): Xaa can be any naturally occurring amino acid
  misc_feature (210)..(210): Xaa can be any naturally occurring amino acid
  misc_feature (230)..(230): Xaa can be any naturally occurring amino acid
  misc_feature (286)..(286): Xaa can be any naturally occurring amino acid
  misc_feature (295)..(295): Xaa can be any naturally occurring amino acid
  misc_feature (328)..(328): Xaa can be any naturally occurring amino acid
  misc_feature (331)..(331): Xaa can be any naturally occurring amino acid
  misc_feature (362)..(362): Xaa can be any naturally occurring amino acid
  misc_feature (410)..(410): Xaa can be any naturally occurring amino acid
  misc_feature (420)..(420): Xaa can be any naturally occurring amino acid
  misc_feature (441)..(441): Xaa can be any naturally occurring amino acid
MGARAXVLSGGELDRWEKIRLRPGGKKKYRLKHIVWASRELERFAVNPGLLETSEGCKQILGQLQPALQTGSEELRSLFNTVAVLYCVHRXIDVKDTKEALETIEEEQNKSKEKXQQAAADTGNSSQVSRNYPIVQNIQGQMVHQPLSPRTLNAWVKVXEEKXFSPEVIPMFSALSEGATPQDLNTMLNTVGXHQAAMQMLKETINEEAXEWDRLHPVHAGPIAPGQMRXPRGSDIAGTTSNLQEQIAWMTNNPPIPVGEIYKRWIILGLNKIVRMYSPTSILDIXQGPKEPFRXYVDRFYKTLRAEQATQEVKNWMTETLLVQNANXDCXTILKALGPAATLEEMMTACQGVGGPGHKARXLAEAMSQVTNSTIMMQKGNFRNQRKIVKCFNCGKEGHIARNCRAPRKXGCWKCGKEGXQMKDCTERQANFLGRIWPSSXGRPGNFLQNRPEPTAPPEESFRFGEETTTPSQKQGRIDTELYPLASLRSLFGNDPSSQ

SEQ ID NO: 402 - protein, 502 aa, Human immunodeficiency virus
MGARASVLSGGELDKWERIRLRPGGKKKYKLKHIVWASRELERFAVNPGLLETSEGCKQILEQLQPSLQTGSEEIKSLFNTVATLYCVHQRIDVRDTKEALDKIEEEQNKSKKVQLAATDKEKSGQVSQNYPIVQNLQGQMVHQPISPRTLNAWVKVVEEKAFSPEVIPMFSALSEGATPQDLNTMLNTVGGHQAAMQMLKETINEEAAEWDRLHPVHAGPIAPGQMREPRGSDIAGTTSNLQEQIGWMTHNPPIPVGDIYKRWIILGLNKIVRMYSPSSILDIKQGPKEPFRDYVDRFYKTLRAEQASQDVKNWMTETLLVQNANPDCKTILKALGPAATLEEMMTACQGVGGPSHKARVLAEAMSQVTSSSATIMMQRGNPRNQRKIVKCFNCGKEGHIARNCRAPRKKGCWKCGKEGHQMKDCTERQANFLGKIWPSHKGRPGNFLQSRPEPTAPPEESFRFGEETTTTTPSQKQEQKDKELYPLASLRSLFGNDPSSQ

SEQ ID NO: 403 - protein, 499 aa, Human immunodeficiency virus
MGARASVLSGGELDKWERIRLRPGGKKKYQLKHIVWASRELERFAVNPGLLETSEGCRQILGQLQPSLQTGSEELKSLYNTVATLYCVHQKIDIRDTKEALEKIEEEQNKSKKKAQQAATDTGNSNQVSQNYPIVQNLQGQMVHQPISPRTLNAWVKVVEEKAFNPEVIPMFSALSEGATPQDLNTMLNTVGGHQAAMQMLKETINEEAAEWDRTHPVHAGPVAPGQMREPRGSDIAGTTSNLQEQIGWMTSNPPIPVGEIYKRWIILGLNKIVRMYSPTSILDIRQGPKEPFRDYVDRFYKVLRAEQASQDVKNWMTETLLVQNANPDCKTILKALGPAATLEEMMTACQGVGGPGHKARVLAEAMSQVTNSATAAIMMQKGNFRTQRKIVKCFNCGKEGHIARNCRAPRKRGCWKCGKEGHQMKDCTERQANFLGKIWPSHKGRPGNFLQSRPEPTAPPEESFRFGEETATPSQKQEPIDKEMYPLASLKSLFGNDP

SEQ ID NO: 404 - protein, 498 aa, Human immunodeficiency virus
  misc_feature (103)..(103): Xaa can be any naturally occurring amino acid
  misc_feature (218)..(218): Xaa can be any naturally occurring amino acid
  misc_feature (352)..(352): Xaa can be any naturally occurring amino acid
  misc_feature (406)..(406): Xaa can be any naturally occurring amino acid
  misc_feature (447)..(447): Xaa can be any naturally occurring amino acid
  misc_feature (480)..(480): Xaa can be any naturally occurring amino acid
MGARASVLSAGELDRWERIRLRPGGKKKYRLKHIVWASRELERFAVNPGLLETSGGCRQILEQLQPSLQTGSEELKSLFNAVAVLYCVHQKIEVKDTKEALEXIEEEQNKSKKKAQQAAADAGNSSQVSQNYPIVQNLQGQMVHQPLSPRTLNAWVKVIEEKAFSPEVIPMFSALSEGATPQDLNTMLNTVGGHQAAMQMLKETINEEAAEWDRLHPXHAGPVAPGQMREPRGSDIAGTTSNLQEQITWMTNNPPIPVGEIYKRWIILGLNKIVRMYSPVSILDIRQGPKEPFRDYVDRFYKTLRAEQASQEVKNWMTETLLVQNANPDCKTILKALGPSASLEEMMTACQXVGGPGHKARVLAEAMSQVTKSPTIMVQGGNFRNQRKIVKCFNCGKEGHIARNCXAPRKKGCWKCGKEGHQMKDCSERQANFLGKIWSSHKGRPGXFLQSRPEPTAPPEESFRFGEETATPPQKQEDKXLYPLASLKSLFGNDPSSQ

SEQ ID NO: 405 - protein, 500 aa, Human immunodeficiency virus
  misc_feature (44)..(44): Xaa can be any naturally occurring amino acid
  misc_feature (244)..(244): Xaa can be any naturally occurring amino acid
MGARASVLSGGELDKWERIRLRQGGKKKYQLKHIVWASRELERXAVNPGLLETAEGCRQILGQLQPALQTGSEELRSLYNTVATLYCVHQKIEVKDTKEALEKIEEEQNKSKKKAQQAAADTGNSSQVSQNYPIVQNPQGQMIHQAISPRTLNAWVKVVEEKAFSPEVIPMFSALSEGATPQDLNTMLNTVGGHQAAMQILKETINEEAAEWDRMHPVHAGPIAPGQMREPRGSDIAGTTSTLXEQIGWMTNNPPIPVGEIYKRWIILGLNKIVRMYSPISILDIRQGPKEPFRDYVDRFYKTLRAEQASQDVKNWMTETLLVQNANPDCKTILKALGPAATLEEMMTACQGVGGPGHKARVLAEAMSQVTNSPAIMMQRGNFRNQRKTVKCFNCGREGHLARNCRAPRKKGCWKCGKEGHQMKDCTERQANFLGKIWSSHKGRPGNFLQSRPEPTAPPEESFRFGEETTTSSQKQEPIDKELYPLASLRSLFGSDPSSQ

SEQ ID NO: 406 - protein, 503 aa, Human immunodeficiency virus
  misc_feature (114)..(114): Xaa can be any naturally occurring amino acid
  misc_feature (125)..(125): Xaa can be any naturally occurring amino acid
  misc_feature (486)..(486): Xaa can be any naturally occurring amino acid
MGARASVLSGGELDKWEKIRLRPGGKKKYRLKHIVWASRELERFAVNPGLLETSEGCRQILGQLHPALQTGSEELKSLYNTVATLYCVHQRIDVKDTKEALEKIEEEQNRSKKXAQQAAADTGSXNQVSQNYPIVQNMQGQLVHQPMSPRTLNAWVKVVEEKSFSPEVIPMFIALSEGATPQDLNTMLNTVGGHQAAMQMLKETINEEAAEWDRLHPVHAGPIAPGQMREPRGSDIAGTTSNLQEQIGWMTSNPPIQVGDIYKRWIVIGLNKIVRMYSPTSILDIKQGPKEPFRDYVDRFYKTLRAEQASQEVKNWMTETLLVQNANPDCKTILKALGPAATLEEMMTACQGVGGPSHKARVLAEAMSQATNSANIMMQRGNFRNQKKIVKCFNCGKEGHIAKNCRAPRKKGCWKCGKEGHQMKDCTERQANFLGKIWPSYKGRPGNFLQNRPEPTAPPAPPEESFRFGEEATTPSQKQDPIDKEXYPLDSLRSLFGNDPSSQ

SEQ ID NO: 407 - protein, 500 aa, Human immunodeficiency virus
  misc_feature (389)..(389): Xaa can be any naturally occurring amino acid
MGARASVLSGGELDRWEKIRLRPGGKKQYRLKHIVWASRELERFAVNPGLLETSEGCRQILGQLQPSLQTGSEELRSLYNTIAVLYCVHQKIEVKDTKEALDKIEEEQNKSKKQAQQAAADAGKSKQVSQNFPIVQNLQGQMVHQALSPRTLNAWVKVVEEKAFSPEVIPMFSALSEGATPQDLNTMLNTVGGHQAAMQMLKETINEEAAEWDRLHPVQAGPVAPGQMREPRGSDIAGTTSTLQEQIGWMTNNPPIPVGEIYKRWIILGLNKIVRMYSPTSILDIRQGPKEPFRDYVDRFYKTLRAEQASQEVKHWMTETLLVQNANPDCKTILKALGSGATLEEMMTACQGVGGPGHKARVLAEAMSQVTSPATIMLQKGNFRNQRKXVKCFNCGKEGHIARNCRAPRKKGCWKCGKEGHQMKDCTERQANFLGKIWPSHRGRPGNFLQSRPEPTAPPEESFRFGGETTTPPQKQEPIDKELYPLASLKSLFGNDPSSQ

SEQ ID NO: 408 - protein, 503 aa, Human immunodeficiency virus
  misc_feature (76)..(76): Xaa can be any naturally occurring amino acid
MGARASVLSGGELDRWEKIRLRPGGKKKYRLKHIVWASRELERFAVNPGLLETSEGCRQILGQLQSSLKTGSKELXSLYNTVATLYCVHQQIEVRDTTEALDKIEEEQNKSKKKAQQEQQAAADAGNRNQVSQNYPIVQNLQGQMVHQPISPRTLNAWVKVVEEKAFSPEVIPMFSALSEGATPQDLNTMLNTVGGHQAAMQMLKETINEEAAEWDRLHPVHAGPIAPGQMREPRGSDIAGTTSNLQEQIAWMTNNPPIPVGDIYKRWIILGLNKIVRMYSPTSILDIKQGPKEPFRDYVDRFYKVLRAEQGSQEVKNWMTETLLVQNANPDCKTILKALGPAATLEEMMTACQGVGGPGHKARVLAEAMSQVTNSATIMMQRGNFRNQRKTVKCFNCGKEGHIAKNCRAPRKRGCWKCGKEGHQMKDCTERQANFLGKIWPSHKGRPGNFLQSRPEPSAPPEESFRFGEEVTTPSQKQEPADKEQYPLASLRSLFGNDPSSQ

SEQ ID NO: 409 - protein, 504 aa, Human immunodeficiency virus
  misc_feature (129)..(129): Xaa can be any naturally occurring amino acid
  misc_feature (430)..(430): Xaa can be any naturally occurring amino acid
  misc_feature (473)..(473): Xaa can be any naturally occurring amino acid
MGARASILSGGKLDKWESIRLRPGGKKKYRLKHIVWASRELERFAVNPGLLETSEGCRQILRQLQPSLQTGSEELRSLYNTVATLYCVHQRIEVKDTKEALDKIEEEQNESKRKKQQAVADTGNSTQNXKQDSQNYPIVQNLQGQMVHQAMSPRTLNAWVKVVEEKAFSPEVIPMFVALSEGATPQDLNTMLNTVGGHQAAMQMLKETINEEAAEWDRLHPVHAGPIAPGQMREPRGSDIAGTTSTLQEQIGWMTSNPPTPVGEIYKRWIVMGLNKIVRMYSPTSILDIKQGPKEPFRDYVDRFYKTLRAEQASQEVKNWMTETLLVQNANPDCRTILKALGPAATLEEMMTACQGVGGPGHKARVLAEAMSQVTNSATIMMQRDNFRNQRKIVKCFNCGKQGHIAKNCRAPRKKGCWKCGKEGHQMKDXNERQANFLGKIWPSHKGRPGNFLQNRPEPTAPPEESFRFGEEXTTPPQKQEPIDQGMYPLASLKSLFGNDPSSQ

SEQ ID NO: 410 - protein, 500 aa, Human immunodeficiency virus
  misc_feature (42)..(42): Xaa can be any naturally occurring amino acid
  misc_feature (95)..(95): Xaa can be any naturally occurring amino acid
  misc_feature (164)..(164): Xaa can be any naturally occurring amino acid
  misc_feature (218)..(218): Xaa can be any naturally occurring amino acid
  misc_feature (258)..(258): Xaa can be any naturally occurring amino acid
  misc_feature (268)..(268): Xaa can be any naturally occurring amino acid
  misc_feature (271)..(271): Xaa can be any naturally occurring amino acid
  misc_feature (293)..(293): Xaa can be any naturally occurring amino acid
  misc_feature (344)..(344): Xaa can be any naturally occurring amino acid
  misc_feature (473)..(474): Xaa can be any naturally occurring amino acid
  misc_feature (479)..(479): Xaa can be any naturally occurring amino acid
MGARASVLSGGKLDKWEKIQLRPGGRKRYRLKHIVWASRELXRFAINPGLLETSEGCRQIIAQLQSALQTGSEELRSLYNTVATLYCVHQKIDIXDTKEALERIEEEQNKSKKKAQQATADIGNSSQVSQNYPIVQNMQGQMVHQPISPRTLNAWVKVVEEKAXSPEVIPMFSALSEGATPQDLNTMLNTVGGHQAAMQMLKEAINEEAAEWDRLHPXHAGPIAPGQMREPRGSDIAGTTSTLQEQIGWMTNNPPIPXGEIYKRWIIXGLXKIVRMYSPTSILDIKQGPKEPXRDYVDRFYKTLRAEQASQEVKNWMTETLLVQNSNPDCKTILKALGPAATLXEMMTACQGVGGPGHKARVLAEAMSQVTNSATIMMQRGNFKGQRKTVKCFNCGREGHIAKNCRAPRKKGCWKCGKEGHQMKDCTERQANFLGKIWPSSKGRPGNFLQSRPEPTAPPEESFRFGEETTTPXXKQEQXDKELYPGASLKSLFGSDPLLQ

SEQ ID NO: 411 - protein, 500 aa, Human immunodeficiency virus
MGARASVLSGGELDRWEKIRLRPGGKKKYKLKHVVWASRELERFAVNPGLLETSEGCRQILAQIQPALQTGSEELRSLYNTVATLYCVHQRIEVKDTREAVEKIEEEQNKSKKKTQQAAANTGNSSQVSQNYPIVQNIQGQMVHQAISPRTLNAWVKVVEEKAFSPEVIPMFSALSEGATPQDLNTMLNTVGGHQAAMQMLKETINEEAAEWDRLHPVQAGPVAPGQMREPRGSDIAGTTSTLQEQIGWMTNNPPIPVGEIYKRWIILGLNKIVRMYSPSSILDIRQGPKEPFRDYVDRFYKTLRAEQASQEVKNWMTETLLVQNANPDCKTILKALGPAATLEEMMTACQGVGGPSHKARVLAEAMSQVTTSATIMTQRGNLRNQRKSVKCFNCGKEGHIARNCRAPRKRGCWKCGKEGHQMKDCTERQANFLGKIWPSHKGRPGNFLQSRPEPTAPPEESFRFGKGTTTLSQKQEQKDEELYPLASLRSLFGNDPSSQ

SEQ ID NO: 412 - protein, 495 aa, Human immunodeficiency virus
  misc_feature (429)..(429): Xaa can be any naturally occurring amino acid
MGARASVLSGGELDRWEKIRLRPGGKKKYRLKHIVWASRELERYAVNPGLLETSEGCRQILGQLQPALQTGSEGFRSLYNTIATLYCVHQKMDVKDTKEALDKIEEEQNKSKKKAQQAAAGTGNSSQVSQNYPIVQNIQGQMVHQPISPRTLNAWVKVVEEKAFSPEVIPMFSALSEGATPQDLNTMLNTVGGHQAAMQMLKETINEEAAEWDRMHPVHAGPVAPGQMREPRGSDIAGTTSTLQEQIGWMTSNPPIPVGEIYKRWIILGLNKIVRMYSPTSILDIRQGPKEPFRDYVDRFYKTLRAEQASQEVKNWMTETLLVQNANPDCKTILKALGPAATLEEMMTACQGVGGPGHKARVLAEAMSQVTNSASIMMQKGNFRNQRKIIKCFNCGKEGHLAKNCRAPRKKGCWKCGKEGHQMKDCTEXQANFLGKIWPSHKGRPGNFLQSRPEPTAPPEESFREEITAPPQRQEPIDKELYPLASLKSLFGNDP

SEQ ID NO: 413 - protein, 499 aa, Human immunodeficiency virus
  misc_feature (28)..(28): Xaa can be any naturally occurring amino acid
  misc_feature (74)..(74): Xaa can be any naturally occurring amino acid
  misc_feature (254)..(254): Xaa can be any naturally occurring amino acid
  misc_feature (279)..(279): Xaa can be any naturally occurring amino acid
  misc_feature (302)..(302): Xaa can be any naturally occurring amino acid
MGARASVLSAGELDRWEKIRLRPGGKKXYRLKHIVWASRELERFAVNPGLLETSDGCRQILGQLQPSLQTGSEXLRSLYNTVATLYCVHQKIEIKDTKEALEKVEEEQNKSKNKAQQAAADTGNSSQVSQNYPIVQNLQGQMMHQAISPRTLNAWVKVVEEKAFSPEVIPMFSALSEGATPQDLNTMLNTVGGHQAAMQMLKETINEEAAEWDRVHPVHAGPVAPGQMREPRGSDIAGTTSTLQEQIGWMTNNXPIPVGEIYKRWIILGLNKIVRMYSXTSILDIRQGPKEPFRDYVDRFYXTLRAEQASQEVKNWMTETLLVQNSNPDCKTILKALGPGATLEEMMTACQGVGGPGHKARVLAEAMSQVTNPGTIMMQRGNFKNQKKIKCFNCGREGHLARNCRAPRKKGCWKCGKEGHQMKDCTERQANFLGKIWPSSKGRPGNFLQNRTEPTAPPEESLRFGEETATPSQKQGPIDKELYPLASLRSLFGNDPSSQ

SEQ ID NO: 414 - protein, 500 aa, Human immunodeficiency virus
  misc_feature (11)..(11): Xaa can be any naturally occurring amino acid
  misc_feature (31)..(31): Xaa can be any naturally occurring amino acid
  misc_feature (55)..(55): Xaa can be any naturally occurring amino acid
  misc_feature (197)..(197): Xaa can be any naturally occurring amino acid
  misc_feature (229)..(229): Xaa can be any naturally occurring amino acid
  misc_feature (298)..(298): Xaa can be any naturally occurring amino acid
  misc_feature (349)..(349): Xaa can be any naturally occurring amino acid
  misc_feature (364)..(364): Xaa can be any naturally occurring amino acid
  misc_feature (381)..(381): Xaa can be any naturally occurring amino acid
MGARASVLSGXELDRWEKIRLRPGGKKKYKXKHIVWASRELERFAVNPGLLETSXGCKQILEQLQPALQTGSEELRSLFNTVATLYCVHQRIDVKDTKEALEKIEEEQNKSKKKVQQAAADTGNSSQVSQNYPIVQNIQGQMVHQPLSPRTLNAWVKVVEEKAFSPEVIPMFTALSEGATPQDLNTMLNTVGGHQAXMQMLKETINEEAAEWDRLHPVHAGPIAPGQMXEPRGSDIAGTTSNLQEQIGWMTNNPPIPVGEIYKRWIILGLNKIVRMYSPTSILDIKQGPKEPFRDYVXRFYKTLRAEQASQEVKNWMTETLLVQNANPDCKTILKALGPAATLEEMMTXCQGVGGPGHKARVLXEAMSQVTNSATIMMQKXNFRNQRKIVKCFNCGKEGHIARNCRAPRKRGCWKCGKEGHQMKDCTERQANFLGKIWPSYKGRPGNFLQSRPEPTAPPEESFRFGEETTTPAQKQEPVDKELYPSASLRSLFGNDPSSQ

SEQ ID NO: 415 - protein, 503 aa, Human immunodeficiency virus
  misc_feature (96)..(96): Xaa can be any naturally occurring amino acid
  misc_feature (329)..(329): Xaa can be any naturally occurring amino acid
MGARASVLSGGELDRWEKIRLRPGGKKKYQLKHIVWASRELERFAVNPGLLETSDGCRQILGQLQPALQTGSEELKSLYNTVATLYCVHQRIEIKXTKEALEKIEEEQNKSKKKVQQAQQVAADTENSSQVSQNYPIVQNIQGQMVHQPLSPRTLNAWVKVVEEKAFSPEVIPMFTALSEGATPQDLNTMLNTVGGHQAAMQMLKETINEEAAEWDRMHPVHAGPIAPGQMREPRGSDIAGTTSNLQEQIGWMTNNPPIPVGEIYKRWIILGLNKIVRMYSPSSILDIKQGPKEPFRDYVDRFYKTLRAEQASQEVKNWMTETLLVQNXNPDCKTILKALGPAATLEEMMTACQGVGGPAHKARVLAEAMSQVTNSATATIMMQRGKVRNQRRMIKCFNCGKEGHIARNCRAPRKKGCWKCGKEGHQMKDCTERQANFLGKIWPSHKGRPGNFLQSRPEPTAPPEESFRFGEESPSQKQDLIDKEQYPLTSLRSLFGNDPSSQ

SEQ ID NO: 416 - protein, 502 aa, Human immunodeficiency virus
MGARASVLSGGELEKWERIRLRPGGKKQYRLKHIVWASRELERFAINPVFLETADGCIQILGQLQPALQTGSEEIRSLYNTVATLYCVHQKIEVKDTKEALDKIEEEQNKSKKKAQQAAADTGNSSQVSQNYPIVQNLQGQMVHQAISPRTLNAWVKVVEEKAFSPEVIPMFSALSEGATPQDLNTMLNTVGGHQAAMQMLKETINEEAAEWDRLHPVHAGPIAPGQMREPRGSDIAGTTSTLQEQIGWMTNNPPIPVGEIYKRWIILGLNKIVRMYSPTSILDIRQGPKEPFRDYVDRFYKTLRAEQASQDVKNWMTETLLVQNANPDCKTILKALGPAATLEEMMTACQGVGGPGHKARVLAEAMSQVTNSAATVMMQKGNFRNQRKPVKCFNCGREGHLARHCRAPRKKGCWKCGKEGHQMKDCTERQANFLGKIWSSHKGGRPGNFLQSRPEPTAPPEESFRFGEETTTPPQKQEPIDKEVYPLTALKSLFGNDPSSQ

SEQ ID NO: 417 - protein, 500 aa, Human immunodeficiency virus
  misc_feature (67)..(67): Xaa can be any naturally occurring amino acid
  misc_feature (144)..(144): Xaa can be any naturally occurring amino acid
  misc_feature (246)..(246): Xaa can be any naturally occurring amino acid
  misc_feature (385)..(385): Xaa can be any naturally occurring amino acid
  misc_feature (464)..(464): Xaa can be any naturally occurring amino acid
  misc_feature (477)..(477): Xaa can be any naturally occurring amino acid
MGARASVLSGGELDRWEKIRLRPGGKKKYKLKHIVWASRELERFAVNPGLLETAEGCRQILGQLQPXLQTGSEELKSLHNTIATLYCVHQRIDVKDTKEALEKIEEEQNKSKKKVQQAAADTGNSSQVSQNYPIVQNLQGQMVXQALSPRTLNAWVKVVEEKAFSPEVIPMFSALSEGATPQDLNTMLNTVGGHQAAMQMLKETINEEAADWDRLHPVHAGPVAPGQLREPRGSDIAGTTSTLQEXIGWMTNNPPIPVGEIYKRWIIMGLNKIVRMYSPTSILDIRQGPKEPFRDYVDRFYKTLRAEQASQEVKNWMTETLLVQNANPDCKTILKALGPAATLEEMMTACQGVGGPGHKARVLAEAMSQVTNSTTVMMQRGNFRXQRKSVKCFNCGREGHIAKNCRAPRKKGCWKCGKEGHQMKDCTERQANFLGKIWPSYKGRPGNFLQSRPEPTAPPEESFXFGEETTASSQKQXPIDKDLYPLTSLRSLFGNDPSSQ

SEQ ID NO: 418 - protein, 498 aa, Human immunodeficiency virus
  misc_feature (25)..(25): Xaa can be any naturally occurring amino acid
  misc_feature (155)..(155): Xaa can be any naturally occurring amino acid
  misc_feature (204)..(204): Xaa can be any naturally occurring amino acid
  misc_feature (215)..(215): Xaa can be any naturally occurring amino acid
  misc_feature (224)..(224): Xaa can be any naturally occurring amino acid
  misc_feature (253)..(253): Xaa can be any naturally occurring amino acid
  misc_feature (336)..(336): Xaa can be any naturally occurring amino acid
  misc_feature (340)..(340): Xaa can be any naturally occurring amino acid
  misc_feature (388)..(388): Xaa can be any naturally occurring amino acid
MGARASVLSGGELDKWEKIRLRPGXKKKYQLKHIVWASRELERFAVNPGLLETAEGCRQILGQLQPSLQTGSEELRSLFNTVATLYCVHSKIEVKDTKEALEKIEEEQNKSKKKAQQAAAADTGNSSNVSQNYPIVQNLQGQMVHQSLSPRTLNXWVKVVEEKGFNPEVIPMFTALSEGATPQDLNTMLNTVGGHQAAMQMLKXTINEEAAEWDXLHPVHAGPXAPGQMREPRGSDIAGTTSNLQEQIAWMTXNPPVPVGEIYKRWIILGLNKIVRMYSPTSILDIKQGPKEPFRDYVDRFYKTLRAEQASQDVKNWMTETLLVQNANPDCKTILXAMGXGASLEEMMTACQGVGGPGHKARVLAEAMSQVTNSTTIMMQRGNFRKQXKIVKCFNCGKEGHIARNCRAPRKKGCWKCGKEGHQMKDCTERQANFLGKIWPSYKGRPGNFLQNRPEPTAPPEESFSFGEETTAPPQKQEPINKELYPSTSLRSLFGNDP

SEQ ID NO: 419 - protein, 498 aa, Human immunodeficiency virus
  misc_feature (93)..(93): Xaa can be any naturally occurring amino acid
  misc_feature (158)..(158): Xaa can be any naturally occurring amino acid
  misc_feature (257)..(257): Xaa can be any naturally occurring amino acid
  misc_feature (262)..(262): Xaa can be any naturally occurring amino acid
MGARASVLSGGELDKWERIRLRPGGRKKYQLKHIVWASRELERFALNPGLLETAEGCRQILGQIQPALQTGSEELKSLHNTVAVLYCVHQKIXVRDTKEALEKIEEEQNKSKKKQQAAADTGSSSQVSQNYPIVQNLQGQMVHQAISPRTLNAWVKVXEEKAFSPEVIPMFSALSEGATPQDLNTMLNTVGGHQAAMQMLKETINEEAAEWDRVHPVHAGPVAPGQMREPRGSDIAGTTSTLQEQIGWMTNNPPIPXGEIYXRWIILGLNKIVRMYSPTSILDIRQGPKEPFRDYVDRFYKTLRAEQASQEVKNWMTETLLVQNANPDCKTILKALGPAATLEEMMTACQGVGGPGHKARVLAEAMSQVNSPAIMMQRGNFKGQRKIVKCFNCGKEGHIARNCRAPRKKGCWKCGKEGHQMKDCTERQANFLGKIWPSSKGRPGNFLQNRTEPTAPPEESFRFGEETTTPSQKQDQKDKELYPLASLRSLFGSDPSSQ

SEQ ID NO: 420 - protein, 500 aa, Human immunodeficiency virus
MGARASVLSGGELDRWEKIRLRPGGKKKYRLKHIVWASRELERFAVNPGLLETSEGCRQILGQLQPALQTGSEELRSLYNTVATLYCVHQKIEVKDTKEALEKIEEEQNKSKKKAQQAAADTGNSSKVSQNYPIVQNIQGQMVHQPIAPRTLNAWVKVVEEKAFSPEVIPMFSALSEGATPQDLNTMLNTIGGHQAAMQMLKETINEEAAEWDRLHPVQAGPIAPGQLREPRGSDIAGTTSTLQEQMTWITNNPPIPVGEIYKRWIILGLNKIVRMYSPTSILDIRQGPKEPFRDYVDRFYKTLRAEQASQEVKNWMTETLLVQNANPDCKTILKALGPAATLEEMMTACQGVGGPGHKARVLAEAMSQVTNSATIMMQRGNFRKQRKIIKCFNCGKEGHLARNCRAPRKKGCWKCGKEGHQMKDCTERQANFLGKIWPSYKGRPGNFLQSRPEPTAPPEESFRFGEKTITPSQKQEPIDKELYPLTSLRSLFGNDPSSQ

SEQ ID NO: 421 - protein, 502 aa, Human immunodeficiency virus
MGARASVLSGGELDRWEKIRLRPGGKKKYRLKHIVWASRELERFALNPGLLETSEGCRQILGQLQPALQTGSEEFRSLYNTVATLYCVHQKIEVKDTKEALDKIEEEQNKSKKKAQQAAADTGNSSQVSQNYPIVQNLQGQMVHQAISPRTLNAWVKVVEEKAFSPEVIPMFSALSEGATPQDLNTMLNTVGGHQAAMQMLKDTINEEAAEWDRLHPVHAGPIAPGQMREPRGSDIAGTTSTLQEQIGWMTNNPPIPVGEIYKRWIILGLNKIVRMYSPTSILDIRQGPKEPFRDYVDRFYKTLRAEQASQDVKNWMTETLLVQNANPDCKTILKALGPAATLEEMMTACQGVGGPSHKAKILAEAMSQVTNSASASIMMQRGNFRNQKRVIKCFNCGKEGHLAKNCRAPRKRGCWKCGKEGHQMKDCTERQANFLGRIWPSLKGRPGNFLQNRPEPSAPPEESFRFGEETTTPSQKQEPIDKELYPLASLKSLFGNDPSSQ

SEQ ID NO: 422 - protein, 500 aa, Human immunodeficiency virus
  misc_feature (55)..(55): Xaa can be any naturally occurring amino acid
  misc_feature (61)..(61): Xaa can be any naturally occurring amino acid
  misc_feature (235)..(235): Xaa can be any naturally occurring amino acid
  misc_feature (371)..(371): Xaa can be any naturally occurring amino acid
  misc_feature (483)..(483): Xaa can be any naturally occurring amino acid
MGARASVLSGGELDKWEKIRLRPGGKKKYKLKHIVWASRELERFAVNPGLLETSXGCRQIXGQLQPALQTGSEELKSLYNTVATLYCVHQRIEVKDTKEALEKIEEEQNRSKKKAQQAAADTGNSSQVSQNYPIVQNIQGQMVHQAISPRTLNAWVKVVEEKAFSPEVIPMFSALSEGATPQDLNTMLNTVGGHQAAMQMLKETINDEAAEWDRLHPVHAGPIAPGQMREPRGSXIAGTTSTLQEQIGWMTNNPPIPVGEIYKRWIILGLNKIVRMYSPTSILDIRQGPKEPFRDYVDRFYKTLRAEQATQEVKNWMTETLLVQNANPDCKTILKALGPAATLEEMMTACQGVGGPGHKARVLAEAMSQVXNPTTVMMQRGNLRNQRKIVKCFNCGKEGHIARNCRAPRKRGCWKCGKEGHQMKDCTERQANFLGKIWPSSKGRPGNFLQSRPEPTAPPEESFRFGEETTTPSQKQEPMDKEXHPLASLRSLFGNDPSSQ

SEQ ID NO: 423 - protein, 502 aa, Human immunodeficiency virus
  misc_feature (18)..(18): Xaa can be any naturally occurring amino acid
  misc_feature (47)..(47): Xaa can be any naturally occurring amino acid
  misc_feature (55)..(55): Xaa can be any naturally occurring amino acid
  misc_feature (62)..(62): Xaa can be any naturally occurring amino acid
  misc_feature (68)..(68): Xaa can be any naturally occurring amino acid
  misc_feature (84)..(84): Xaa can be any naturally occurring amino acid
  misc_feature (88)..(88): Xaa can be any naturally occurring amino acid
  misc_feature (122)..(122): Xaa can be any naturally occurring amino acid
  misc_feature (125)..(125): Xaa can be any naturally occurring amino acid
  misc_feature (173)..(173): Xaa can be any naturally occurring amino acid
  misc_feature (186)..(186): Xaa can be any naturally occurring amino acid
  misc_feature (216)..(216): Xaa can be any naturally occurring amino acid
  misc_feature (246)..(246): Xaa can be any naturally occurring amino acid
  misc_feature (256)..(256): Xaa can be any naturally occurring amino acid
  misc_feature (283)..(283): Xaa can be any naturally occurring amino acid
  misc_feature (286)..(286): Xaa can be any naturally occurring amino acid
  misc_feature (298)..(298): Xaa can be any naturally occurring amino acid
  misc_feature (302)..(302): Xaa can be any naturally occurring amino acid
  misc_feature (309)..(309): Xaa can be any naturally occurring amino acid
  misc_feature (337)..(337): Xaa can be any naturally occurring amino acid
  misc_feature (357)..(357): Xaa can be any naturally occurring amino acid
  misc_feature (366)..(366): Xaa can be any naturally occurring amino acid
  misc_feature (457)..(457): Xaa can be any naturally occurring amino acid
  misc_feature (500)..(500): Xaa can be any naturally occurring amino acid
MGARASVLSGGELDRWEXIRLRPGGKKKYRLKHIVWASRELERFAVXPGLLETSXGCRQILXQLQPAXQTGSEELKSLYNTVAXLYCXHQRIDVKDTKEALERIEEEQNKSKKKAQPAAADXGNXSQVSQNYPIVQNIQGQMVHQAISPRTLNAWVKVIEEKAFSPEVIPMFXALSEGATPQDLNXMLNTVGGHQAAMQMLKETINEEAAEWDRMXPVHAGPIAPGQMREPRGSDIAGTTSTLQEXIGWMTSNPPXPVGEIYKRWIILGLNKIVRMYSPVSIXDIXQGPKEPFRDYVXRFYXTLRAEQXTQEVKNWMTETLLVQNSNPDCKTILKAXGPAATLEEMMTACQGVGGPXHKARVLAEXMSQVTNSTAIMMQKGNFRNQRRTVKCFNCGKEGHIAKNCRAPRKRGCWKCGKEGHQMKDCTERQANFLGKIWPSHKGRPGNFLQSRPEPTXPPEESFRFGEETATPSQKQELINLDQELYPSASLKSLFGNDPXSK

SEQ ID NO: 424 - protein, 500 aa, Human immunodeficiency virus
  misc_feature (83)..(83): Xaa can be any naturally occurring amino acid
  misc_feature (138)..(138): Xaa can be any naturally occurring amino acid
MGARASVLSGGKLDKWEKIRLRPGGKKKYKLKHIVWASRELERFAVNPGLLETSDGCRQILGQLQPALQTGSEELKSLYNTVXTLYCVHQRIEIQDTKEALEKIEEEQNKSKKKAQQVAADTGNSSQASQNYPIVQNXQGQMVHQAISPRTLNAWVKVIEEKAFSPEVIPMFSALSEGATPQDLNTMLNTVGGHQAAMQMLKETINEEAAEWDRLHPVHAGPIAPGQMREPRGSDIAGTTSTLQEQIDWMTHNPPIPVGEIYKRWIILGLNKIVRMYSPSSILDIKQGPKEPFRDYVDRFYKTLRAEQASQEVKNWMTETLLVQNANPDCKTILKALGPAATLEEMMTACQGVGGPGHKARVLAEAMSQVTNSATIMMQKGKFKNQRKIVKCFNCGKEGHIARNCRAPRKRGCWKCGKEGHQMKDCTERQANFLGKIWPSYKGRPGNFLQSRLEPTAPPEESFRFGEETTTLSQKQESIDKELHPLTSLRSLFGNDPSSQ

SEQ ID NO: 425 - protein, 500 aa, Human immunodeficiency virus
MGARASVLSGGELDRWERIRLRPGGKKQYKLKHIVWASRELERFAVNPGLLETSEGCRQILGQLQPSLQTGSEELKSLYNTVATLYCVHQRIEVKDTKEALEKIEEEQNKSKRKAQQAAADTGNSSQVSQNYPIVQNPQGQMIHQAISPRTLNAWVKVIEEKAFSPEVIPMFSALSEGATPQDLNTMLNTVGGHQAAMQMLKETINEEAAEWDRLHPVHAGPIAPGQMREPRGSDIAGTTSTLQEQIAWMTNNPPIPVGEIYKRWIILGLNKIVRMYSPVSILDIKQGPKEPFRDYVDRFYKTLRAEQASQEVKNWMTETLLVQNANPDCKTILKALGPGATLEEMMTACQGVGGPSHKARVLAEAMSQATNAATIMMQRGNFRNQRKIIKCFNCGKEGHLAKNCKAPRKKGCWKCGKEGHQMKECTERQANFLGKIWPSYKGRPGNFPQSRLEPTAPPEESFRFGEKTTTPSQKQEPIDKELYPSTSLRSLFGNDPSSQ

SEQ ID NO: 426 - protein, 500 aa, Human immunodeficiency virus
MGARASVLSGGELDKWEKIRLRPGGKKKYRLKHIVWASRELERFAVNPGLLETSDGCRQILKQLQPSLQTGSEELKSLYNTVATLYCVHQRKDVKDTKEALEKIEEEQNKSREKAQLAAADTGNSSPASQNYPIVQNLQGQAVHQALSPRTLNAWVKVVEEKAFSPEVIPMFSALSEGATPQDLNTMLNTVGGHQAAMQMLKETINEEAAEWDRLHPVHAGPIAPGQMREPRGSDIAGTTSTLQEQIGWMTNNPPIPVGEIYKRWIIMGLNKIVRMYSPTSILDIRQGPKEPFRDYVDRFYKTLRAEQASQEVKNWMTETLLIQNANPDCKTILKALGPAATLEEMMTACQGVGGPGHKARVLAEAMSQVTNSATIMMQKGNFRNQKKVVKCFNCGKEGHIARNCRAPRKKGCWKCGKEGHQMKDCTERQANFLGKIWPSRKGRPGNFLQSRPEPTAPPEESFRVGEETATPSQRQETIDKELCPLPSLRSLFGNDPSSQ

SEQ ID NO: 427 - protein, 502 aa, Human immunodeficiency virus
MGARASVLSGGKLDRWEKIRLRPGGKKKYKLKHIVWASRELERFAVNPGLLETSEGCRQILGQLQPALRTGSEELRSLYNTIATLYCVHQQIEVKDTKEALEKIEEEQNKSKKKVQQAAADTGNSSQNSQNYPIVQNVQGQMVHQAISPRTLNAWVKVIEEKAFSPEVIPMFSALSEGATPQDLNTMLNTVGGHQAAMQILKETINEEAADWDRLHPVHAGPIAPGQMREPRGSDIAGTTSTLQEQIGWMTNNPPIPVGEIYKRWIILGLNKIVRMYSPTSILDIRQGPKEPFRDYVDRFYKTLRAEQASQEVKNWMTETLLVQNANPDCKTILKALGPAATLEEMMTACQGVGGPGHKARVLAEAMSQVTNSATMMMQRGNYRHQKKIVKCFNCGREGHIAKNCRAPRKKGCWKCGKEGHQMKDCTERQANFLGKIWPSYKGRPGNFLQSRPEPTAPPEESFRFGEETTTTSQKQKQETVDKELYPLTSLRSLFGNDPSSQ

SEQ ID NO: 428 - protein, 500 aa, Human immunodeficiency virus
  misc_feature (412)..(412): Xaa can be any naturally occurring amino acid
  misc_feature (427)..(427): Xaa can be any naturally occurring amino acid
  misc_feature (431)..(431): Xaa can be any naturally occurring amino acid
  misc_feature (437)..(437): Xaa can be any naturally occurring amino acid
MGARASVLSGGELDKWEKIRLRPGGKKKYKLKHIVWASRELERFAVNPGLLETSSGCRQILEQLQPSLQTGSEELRSLYNTVATLYCVHQKIEVKDTKEALEKVEEEQNKSKKKAQQAAADTGNSSKVSQNYPIVQNVQGQMVHQPISPRTLNAWVKVVEEKAFSPEVIPMFSALSEGATPQDLNTMLNTVGGHQAAMQMLKETINEEAAEWDRMHPVHAGPIAPGQMREPRGSDIAGTTSNLQEQIAWMTNNPPIPVGEIYKRWIILGLNKIVRMYSPTSILDIRQGPKEPFRDYVDRFYKTLRAEQASQEVKNWMTETLLVQNANPDCKTILKALGPAATLEEMMTACQGVGGPGHKARVLAEAMSQVTNSTTIMMQRGTLRNQRKIVKCFNCGKEGHIARNCRAPRKKXCWKCGREGHQMKDCXERQXNFLGKXWPSRKGRPGNFLQSRPEPTAPPEESFRFGEETTPPSQKQELIDKEAYPLASLRSLFGNDPSSQ

SEQ ID NO: 429 - protein, 500 aa, Human immunodeficiency virus
  misc_feature (464)..(464): Xaa can be any naturally occurring amino acid
MGARASVLSGGGLDRWEKIRLRPGGKKKYRLKHIVWASRELERFAVNPGLLETPEGCRQILGQLQPALQTGSEELKSLFNTVATLYCVHQKIEVRDTKEALEKIEEEQNKSKKKAQQAVADTGNSSQVSQNYPIVQNIQGQMVHQAMSPRTLNAWVKVVEEKAFSPEVIPMFAALSEGATPQDLNTMLNTVGGHQAAMQMLKETINEEAAEWDRLHPVHAGPIAPGQMREPRGSDIAGTTSNLQEQIGWMTSNPPIPVGEIYKRWIIMGLNKIVRMYSPTSILDIRQGPKEPFRDYVDRFYKTLRAEQASQEVKNWMTETLLVQNANPDCRTILKALGPAATLEEMMTACQGVGGPGHKARVLAEAMSQVTNSATIMMQRGNGRTQRKIVKCFNCGKEGHIARNCRAPRKRGCWKCGKEGHQMKDCTERQANFLGKIWPSYKGRPGNFLQNRPEPTAPPEESFXFGDETTTPSQKQEPIDKDLYPSASLRSLFGNDPSSQ

SEQ ID NO: 430 - protein, 501 aa, Human immunodeficiency virus
MGARASVLSGGQLDRWEKIRLRPGGKKKYRLKHIVWASRELERFAVNPGLLETAGGCRQILEQLQPSLQTGSEELRSLYNTVATLYCVHQKLEVKDTKEALDKIEEEQNKSKKKAQQAAAAADTGNNSKVSQNYPIVQNLQGQMVHQSLSPRTLNAWVKVIEEKAFSPEIIPMFTALSEGATPQDLNTMLNTVGGHQAAMQMLKETINEEAAEWDRVHPVQAGPVAPGQIREPRGSDIAGTTSNLQEQIAWMTNNPPIPVGEIYKRWIILGLNKIVRMYSPVSILDIRQGPKEPFRDYVDRFYKTLRAEQASQEVKNWMTETLLVQNSNPDCKHILKALGPGATLEEMMTACQGVGGPSHKARVLAEAMSQVTNPTTIMMQRGNFKQRKTIKCFNCGKEGHTARNCRAPRKKGCWKCGKEGHQMKDCTERQANFLGKIWPSHKGRPGNFLQSRPEPTAPPEESFRFGEGTATPSQKQGPIDEELYPLASLKSLFGNDPSSQ

SEQ ID NO: 431 - protein, 500 aa, Human immunodeficiency virus
  misc_feature (76)..(76): Xaa can be any naturally occurring amino acid
  misc_feature (147)..(147): Xaa can be any naturally occurring amino acid
MGARASVLSGGELDRWEKIRLRPGSKKKYRLKHLVWASRELERFAVNPGLLETSEGCRQILAQLQPALQTGSEELXSLYNTVATLYCVHQKIEIKDTKEALDRIEEEQNRSKKRAQQAAADTGSSSQVSQNYPIVQNMQGQMVHQPXTPRTLNAWVKVVEEKAFSPEVIPMFSALSEGATPQDLNTMLNTVGGHQAAMQMLKETINEEAAEWDRVHPVHAGPIAPGQMREPRGSDIAGTTSTLQEQIDWMTHNPPIPVGEIYKRWIILGLNKIVRMYSPTSILDIRQGPKEPFRDYVDRFYKTLRAEQASQEVKNWMTETLLVQNANPDCKTILKALGPAATLEEMMTACQGVGGPGHKARVLAEAMSQVTNSANIMMQRGNFRKQRKVIKCFNCGKEGHIAKNCRAPRKRGCWKCGQEGHQMKDCTERQANFLGKIWPSHKGRPGNFLQSRPEPTAPPEESFRFGEEITTPSQKQEPLDKEMYPLTSLRSLFGNDPSSQ

SEQ ID NO: 432 - protein, 497 aa, Human immunodeficiency virus
MGARASVLSGGKLDKWERIRLRPGGNKKYKLKHLVWASRELERFAVNPGLLETAEGCRQILGQLQPSLQTGSEELKSLYNTIATLYCVHQQIEVKDTKEALEKIEEEQNKSKKKAQQAVADTGNSSQVSQNYPIVQNLQGQMVHQPLSPRTLNAWVKVIEEKAFSPEVIPMFSALSEGATPQDLNTMLNTVGGHQAAMQMLKETINEEAAEWDRLHPVHAGPIAPGQMREPRGSDIAGTTSNLQEQIAWMTNNPPIPVGEIYKRWIILGLNKIVRMYSPVSILDIRQGPKEPFRDYVDRFYKTLRAEQATQEVKNWMTETLLVQNANPDCKTILKALGPAATLEEMMTACQGVGGPSHKARVLAEAMSHVTSPANVMMQRGNFRNQRKTVKCFNCGKEGHIAKNCRAPRKKGCWKCGKEGHQMKDCTERQANFLGKIWPSHKGRPGNFLQSRPEPTAPPEESFRFGEETTTPSQKQELADKEQYPLASLRSLFGNDP

SEQ ID NO: 433 - protein, 502 aa, Human immunodeficiency virus
MGARASILSGGELDRWEKIRLRPGGNKKYRLKHIVWASRELERFAVNPGLLETAEGCRQILGQLQPALQTGSEELKSLFNTVATLYCVHQRIDIKDTKEALEKIEEEQNKSKKKAQQAAADTGNSSQVSQNYPIVQNMQGQMVHQPMSPRTLNAWVKVIEEKAFSPEVIPMFAALSEGATPQDLNTMLNTVGGHQAAMQMLKETINEEAAEWDRLHPVHAGPIAPGQMREPRGSDIAGTTSNLQEQIAWITSNPPIPVGDIYKRWIILGLNKIVRMYSPTSILDIKQGPKEPFRDYVDRFYKTLRAEQATQEVKNWMTETLLVQNANPDCKTILKALGPQATLEEMMTACQGVGGPGHKARVLAEAMSQVTNSANIMMQRGNFKNQRKPVKCFNCGKEGHIARNCRAPRKRGCWKCGKEGHQMKDCTERQANFLGKIWPSHKGRPGNFLQSRPEPTAPPEESFRFGEETSTPSQKQESIDRDKDMYPLTSLRSLFGNDPSSQ

SEQ ID NO: 434 - protein, 500 aa, Human immunodeficiency virus
MGARASVLSGGELDRWEKIRLRPGGKKKYKLKHIVWASRELERFAVNPGLLETSEGCRQILEQLQPALQTGSEELKSLYNTVATLYCVHQRIEIKDTKEALDKIEEEQNKSKKKAQQAAADTGNSKQVSQNYPIVQNLQGQMVHQPMSPRTLNAWVKVVEEKAFSPEVIPMFSALAEGATPQDLNTMLNTVGGHQAAMQMLKETINEEAAEWDRLHPVQAGPVAPGQMREPRGSDIAGTTSNLQEQIGWMTHNPPIPVGEIYKRWIILGLNKIVRMYSPTSILDIRQGPKEPFRDYVDRFYKTLRAEQASQDVKNWMTETLLVQNANPDCKTILKALGPAATLEEMMTACQGVGGPSHKARVLAEAMSQATNSTTVMMQRGKFRNQTKPVKCFNCGKEGHIARNCRAPRKKGCWKCGKEGHQMKDCTERQANFLGKIWPSYKGRPGNFLQSRPEPTAPPEESFRFGEEKTTPSQKQETIDQDLYPLASLRSLFGNDPSSQ

SEQ ID NO: 435 - protein, 500 aa, Human immunodeficiency virus
MGARASVISGGELDRWEKIRLRPGGSKKYRLKHIVWASRELERFAVNPGLLETSEGCRQILGQLQPALQTGSEELRSLYNTVATLYCVHQRIDVKDTKEALEKIEEEQNKSKKKAQQAAADTGNSSQVSQNYPIVQNLQGQMVHQPLSPRTLNAWVKVVEEKAFSPEVIPMFSALSEGATPQDLNTMLNTVGGHQAAMQMLKETINEEAAEWDRLHPVHAGPIAPGQMREPRGSDIAGTTSNLQEQIGWMTNNPPIPVGEIYKRWIILGLNKIVRMYSPTSILDIRQGPKEPFRDYVDRFYKTLRAEQASQEVKNWMTETLLVQNANPDCKTILKALGPGATLEEMMTACQGVGGPGHKARVLAEAMSQVTNSTTIMMQKGNFRNQRKTVKCFNCGKEGHIARNCRAPRKRGCWKCGKEGHQMKDCTERQANFLGKIWPSHKGRPGNFLQSRPEPTAPPEESFRFGEETATPSQKQEPIDKELYPLASLRSLFGNDPSSQ

SEQ ID NO: 436 - protein, 499 aa, Human immunodeficiency virus
MGARASVLSGGELDRWEKIRLRPGGKKKYRLKHIVWASRELERFAVNPGLLETAEGCRQILEQLQPALQTGSEELRSLFNTVATLYCVHHRIEVKDTKEALEKIEEEQNKSKKKAQQAADTGNSSKVSQNYPIVQNLQGQMVHQAMSPRTLNAWVKVVEEKAFSPEVIPMFSALSEGATPQDLNTMLNTIGGHQAAMQMLKETINEEAAEWDRLHPVQAGPIAPGQMREPRGSDIAGTTSNLQEQIGWMTHNPPIPVGEIYKRWIILGLNKIVRMYSPSSILDIKQGPKEPFRDYVDRFYKTLRAEQASQEVKNWMTETLLVQNANPDCKTILKALGPAATLEEMMTACQGVGGPSHKARVLAEAMSQMTNPATIMMQRGNFKNQRKSVKCFNCGKEGHIARNCRAPRKKGCWKCGKEGHQMKDCTERQANFLGKIWPSHKGRPGNFLQSRPEPTAPPEESFRFGEETTTPSQKQEPIDQERYPLASLRSLFGNDPSSQ

SEQ ID NO: 437 - protein, 500 aa, Human immunodeficiency virus
  misc_feature (28)..(28): Xaa can be any naturally occurring amino acid
  misc_feature (118)..(118): Xaa can be any naturally occurring amino acid
  misc_feature (136)..(136): Xaa can be any naturally occurring amino acid
  misc_feature (172)..(172): Xaa can be any naturally occurring amino acid
  misc_feature (204)..(204): Xaa can be any naturally occurring amino acid
  misc_feature (228)..(228): Xaa can be any naturally occurring amino acid
  misc_feature (235)..(235): Xaa can be any naturally occurring amino acid
  misc_feature (288)..(288): Xaa can be any naturally occurring amino acid
  misc_feature (298)..(298): Xaa can be any naturally occurring amino acid
  misc_feature (345)..(345): Xaa can be any naturally occurring amino acid
  misc_feature (388)..(388): Xaa can be any naturally occurring amino acid
  misc_feature (411)..(411): Xaa can be any naturally occurring amino acid
  misc_feature (478)..(478): Xaa can be any naturally occurring amino acid
MGARASVLSGGELDRWERIRLRPGGKKXYRLKHVVWASRELERFAVNPGLLETSEGCKRILEQLQPSLQTGSEELKSLYNTVATLYCVHRKIDVKDTKEALEKIEEEQNKSKKRAQQXAADTGNSSQVSQNYPIVXNLQGQMVHQAMTPRTLNAWVKVVEEKAFSPEVIPMXSALSEGATPQDLNTMLNTVGGHQAAMQMLKEXINEEAAEWDRLHPVHAGPIAPGQXREPRGSXIAGTTSNLQEQIAWMTHNPPIPVGEIYKRWIILGLNKIVRMYSPSSILDIKQXPKEPFRDYVXRFYKTLRAEQASQEVKNWMTETLLVQNANPDCKTILKALGPAATLEXMMTACQGVGGPGHKARVLAEAMSQVTNSASVMMQKGNFRNQRXPIKCFNCGKEGHLARNCRAPRKXGCWKCGKEGHQMKDCTERQANFLGKIWPSHKGRPGNFLQNRPEPTAPPEESFRFGEETTTPPQKQEXIDKDLYPLASLKSLFGNDPSSQ

SEQ ID NO: 438 - protein, 500 aa, Human immunodeficiency virus
MGARASILSGGELDRWEKIRLRPGGKKKYRLKHLVWASRELERFAVNPGLLETAEGCRQIIGQLQPSLQTGSEELRSLYNTVATLYCVHQKIEVKDTKEALEKIEEEQNKSKKKAQQAAAGAGTSQVSQNYPIVQNLQGQMVHQPISPRTLNAWVKVVEEKAFSPEVIPMFSALSEGATPQDLNTMLNTVGGHQAAMQMLKETINEEAAEWDRLHPVHAGPIAPGQMREPRGSDIAGTTSTLQEQIGWMTNNPPIPVGEIYKRWIILGLNKIVRMYSPTSILDIRQGPKEPFRDYVDRFYKTLRAEQASQDVKNWMTETLLVQNANPDCKTILKALGPAATLEEMMTACQGVGGPSHKARVLAEAMSQTTNAAAAIMMQRGNFRNQRKTVKCFNCGKEGHIAKNCRAPRKKGCWKCGQEGHQMKDCTGRQANFLGKIWPSHKGRPGNFLQSRPEPTAPPAESFRFGEETTAPPQKQEPIDKELYPLASLKSLFGSDPSSQ

SEQ ID NO: 439 - protein, 504 aa, Human immunodeficiency virus
MGARASVLSGGELDRWEKIRLRPGSKKKYQLKHIVWASRELERFAVNPGLLETSEGCRQILGQLQPSLQTGSEELKSLYNTIAVLYCVHQRIEIKDTKEALDKIEEEQNKSKKKAQQAAADTGNSSGKVSQNYPIVQNIQGQMVHQPISPRTLNAWVKVVEEKAFSPEVIPMFSALSEGATPQDLNTMLNTVGGHQAAMQMLKETINEEAAEWDRLHPVHAGPIAPGQMREPRGSDIAGTTSTLQEQIGWMTNNPPIPVGEIYKRWIILGLNKIVRMYSPTSILDIRQGPKEPFRDYVDRFYKTLRAEQASQEVKNWMTETLLVQNSNPDCKTILKALGPAATLEEMMTACQGVGGPSHKAKIMAEAMSQVTNSTAIMMQRGNFRNQRKIVKCFNCGKEGHIARNCRAPRKKGCWKCGKEGHQMKDCTERQANFLGKIWPSSRGRPGNFLQSRPEPTAPSAPPAESFRFGEETTTPSQKQEPTDKELYPLASLRSLFGNDPSSQ

SEQ ID NO: 440 - protein, 500 aa, Human immunodeficiency virus
MGARASVLSGGELDRWEKIRLRPMGKKKYRLKHIVWASRELERFAVNPGLLETSEGCKQILAQLQPSLQTGSEELRSLYNTVATLYCVHQKIEVKDTKEALEKVEEEQNRSKKTAQQAAAGTGNSSQASQNYPIVQNLQGQMVHQPISPRTLNAWVKVVEEKAFSPEVIPMFTALSEGATPQDLNTMLNTVGGHQAAMQMLKETINEEAAEWDRVHPVHAGPIAPGQMREPRGSDIAGTTSTLQEQIGWMTNNPPIPVGEIYKRWIVLGLNKIVRMYSPTSILDIRQGPKEPFRDYVDRFYKTLRAEQASQEVKNWMTETLLVQNANPDCKTILKALGPAATLEEMMTACQGVGGPGHKARVLAEAMSQVTNSATIMMQRGNFRNQRKTVKCFNCGKEGHIARNCRAPRKKGCWKCGKEGHQMKDCTERQANFLGKIWPSHKGRPGNFLQSRPEPTAPPEESFRFGEETTTPSQKQEPRDKELYPLASLRSLFGNDPSSQ

SEQ ID NO: 441 - protein, 501 aa, Human immunodeficiency virus
MGARASVLSGGELDRWEKIRLRPGGKKKYRLKHIVWASRELERFAVNPGLLETSEGCRQILGQLQPSLQTGSEELKSLFNTIAVLYCVHQRINIKDTKEALEKIEEEQNKSKKKTQQAAADTGNSSSQVSQNYPIVQNMQGQMVHQAISPRTLNAWVKVVEEKAFSPEVIPMFVALSEGATPQDLNTMLNTVGGHQAAMQMLKETINEEAAEWDRLHPVHAGPNPPGQMREPRGSDIAGTTSTLQEQIGWMTNNPPIPVGEIYKKWIIIGLNKIVRMYSPTSILDIRQGPKEPFRDYVDRFYKTLRAEQASQEVKNWMTETLLVQNANPDCKTILKALGPAATLEEMMTACQGVGGPSHKARVLAEAMSQVTNSTTVMMQKGNFRNQRKTIKCFNCGKEGHLARNCRAPRKKGCWKCGKEGHQMKDCTERQANFLGKIWPSHKGRPGNFLQSRPEPTAPPEESFRFGEETTTPSQKPEPIDKEVYPLTSLRSLFGNDPSSQ

SEQ ID NO: 442 - protein, 503 aa, Human immunodeficiency virus
MGARASVLSGGKLDKWERIRLRPGGKKKYKLKHLVWASRELERFAVNPGLLETPEGCRQILGQLHPSLQTGSEELKSLYNTVATLYCVHQGIEVKDTKEALEKVEEEQNRSKKKAQQAAADTGNSSRVSHNYPIVQNIQGQMVHQAISPRTLNAWVKVVEEKAFSPEVIPMFSALSEGATPQDLNTMLNTVGGHQAAMQMLKETINEEAAEWDRLHPVHAGPIAPGQMREPRGSDIAGTTSTLQEQIGWMTNNPPIPVGEIYKRWIILGLNKIVRMYSPTSILDIRQGPKEPFRDYVDRFYKTLRAEQASQEVKNWMTETLLVQNSNPDCKTILKALGPAATLEEMMTACQGVGGPSHKARILAEAMSQATNSAAIMMQRGNFRSQGKSVKCFNCGKIGHIAKNCRAPRKKGCWKCGKEGHQMKDCDERQANFLGKIWPSHKGRPGNFLQSRPEPSAPPEESFRFGEETTTPTTPPQKQEPIDKELYPSASLKSLFGSDPSSI

SEQ ID NO: 443 - protein, 506 aa, Human immunodeficiency virus
MGARASVLSGGQLDRWEKIRLRPGGKKRYKLKHIVWASRELERFAVNPGLLETSEGCRQIIAQLQPSLQTGSEELKSLFNTVATLYCVHQRIKVKDTKEALEKIEEEQNKSKKKVQQAAAAAAADTGNSSHVSQNYPIVQNLQGQMVHQPLSPRTLNAWVKVIEEKAFSPEVIPMFTALSEGATPQDLNTMLNTVGGHQAAMQMLKETINEEAAEWDRLHPVHAGPVAPGQMREPRGSDIAGTTSTLQEQIGWMTNNPPIPVGEIYKRWIILGLNKIVRMYSPVSILDIRQGPKEPFRDYVDRFYKTLRAEQASQDVKNWMTETLLVQNANPDCKTILKALGQGATLEEMMSACQGVGGPSHKARILAEAMSQVTNPANILMQRGNFRNQRKTVKCFNCGKEGHIAKNCRAPRKKGCWKCGREGHQMKDCTERQANFLGKIWPPYKGRPGNFLQSRPEPTAPSAPPEESFRFGEETTPSQKQEQIDKELYPSASLRSLFGNDPLSQ

SEQ ID NO: 444 - protein, 503 aa, Human immunodeficiency virus
MGARASVLSGGELDRWEKIRLRPGSKKKYKLKHIVWASRELERFAVNPGLLETSEGCRQILRQLQPSLQTGSEELRSLYNTVATLYCVHQRIDVKDTKEALDKIEEEQNKCKQKVQQAAAADTGNSSNQVSQNYPIVQNMQGQMVHQAISPRTLNAWVKVVEEKAFSPEVIPMFSALSEGATPSDLNTMLNTVGGHQAAMQMLKETINEEAAEWDRLHPVQAGPVAPGQIREPRGSDIAGTTSTLQEQIAWMTHNPPIPVGDIYKRWIILGLNKIVRMYSPTSILDIKQGPKEPFRDYVDRFYKVLRAEQASQEVKNWMTETLLVQNANPDCKTILKALGPAATLEEMMTACQGVGGPGHKARVLAEAMSQVTNSTAIMMQRGNFRGPRKTVKCFNCGKEGHIAKNCRAPRKKGCWKCGKEGHQMRDCNNERQANFLGKIWPSHKERPGNFLQSRPEPTAPPEESFRFGEETATPAQKPEPIDKELYPLASLKSLFGNDPSSQ

SEQ ID NO: 445 - protein, 502 aa, Human immunodeficiency virus
MGARASVLSGGELDRWEKIRLRPGGKKKYRLKHVVWASRELERFAVNPGLLETSEGCRQILGQLHPSLQTGSEELRSLYNTIAVLYCVHQRIEVKDTKEALEKIEEEQNKSKKRAPQTAAAADTGNSSQVSQNYPIVQNLQGQMVHQAISPRTLNAWVKVVEEKAFSPEVIPMFTALSEGATPQDLNTMLNTVGGHQAAMQMLKETINEEAAEWDRLHPVHAGPNPPGQMREPRGSDIAGTTSTLQEQIGWMTSNPPIPVGEIYKRWVILGLNKIVRMYSPTSILDIKQGPKEPFRDYVDRFYKTLRAEQASQEVKNWMTETLLVQNANPDCRTILKALGPAATLEEMMTACQGVGGPGHKARVLAEAMSQATNSVNIMMQRGNLRNQRKMAKCFNCGKEGHIARNCRAPRKKGCWKCGKEGHQMKDCTERQANFLGKIWPSHKGRPGNFLQSRPEPTAPPEESFRFGEETTTPSQKPETIDKEVYPLTSLRSLFGNDPSSQ

SEQ ID NO: 446 - protein, 505 aa, Human immunodeficiency virus
MGARASVLSGGKLDTWEKIRLRPGGKKKYNLKHIVWASRELERFAVNPGLLETPEGCRQILGQLQPSLQTGSEELKSLFNTVAVLYCVHQRIDVKDTKEALDKIEEEQNKSKKQAQQAAADTGNSSGNNSQVSQNYPIVQNAQGQMVHQAITPRTLNAWVKVVEEKAFSPEVIPMFSALSEGATPQDLNTMLNTVGGHQAAMQMLKETINEEAAEWDRVHPVHAGPIAPGQMREPRGSDIAGTTSTLQEQIGWMTHNPPIPVGEIYKRWIILGLNKIVRMYSPVSILDIKQGPKEPFRDYVDRFYKTLRAEQASQDVKNWMTETLLVQNANPDCKTILKALGPAATLEEMMTACQGVGGPGHKARVLAEAMSQVTNSSNIMMQRGNFRNQRRVVKCFNCGKEGHIAKNCRAPRKKGCWKCGREGHQMKDCTERQANFLGKIWPSHKGRPGNFLQSRPEPTALEPTAPPEESFRFGEGTATPSQEQEKLYPLTSLKSLFGNDPSSQ

SEQ ID NO: 447 - protein, 510 aa, Human immunodeficiency virus
MGARASVLSGGDLDRWEKIRLRPGGKKTYKLKHIVWASRELERFAVNPCLLETSTGCRQILGQLHPSLQTGSEELKSLYNTVATLYCVHQKIEIKDTKDALDRIEEEQNKSKKKAQQAAAADTGCSSQASSSQASQNYPIVQNLQGQMVHQAISPRTLNAWVKVVEEKAFSPEVIPMFSALSEGATPQDLNTMLNTVGGHQAAMQMLKETINEEAAEWDRLHPVHAGPIAPGQMREPRGSDIAGTTSTLQEQIGWMTNNPPIPVGEIYKRWIILGLNKIVRMYSPTSILDIRQGPKEPFRDYVDRFYKTLRAEQASQEVKNWMTETLLVQNANPDCKTILKALGPAATLEEMMTACQGVGGPGHKARVLAEAMSQATNAAAVMMQKGNFRGQRKTVKCFNCGKEGHIARNCRAPRKRGCWKCGKEGHQMKDCTERQANFLGKIWPSHKGRPGNFLQNRPEPTVPTAPPAESFRFGEETATPSQKQEPIDKELYPPLASLKSLFGNDPSSQ

SEQ ID NO: 448 - protein, 500 aa, Human immunodeficiency virus
  misc_feature (75)..(75): Xaa can be any naturally occurring amino acid
  misc_feature (102)..(102): Xaa can be any naturally occurring amino acid
  misc_feature (115)..(115): Xaa can be any naturally occurring amino acid
  misc_feature (124)..(124): Xaa can be any naturally occurring amino acid
  misc_feature (136)..(136): Xaa can be any naturally occurring amino acid
  misc_feature (138)..(138): Xaa can be any naturally occurring amino acid
  misc_feature (151)..(151): Xaa can be any naturally occurring amino acid
  misc_feature (215)..(215): Xaa can be any naturally occurring amino acid
  misc_feature (248)..(248): Xaa can be any naturally occurring amino acid
  misc_feature (312)..(312): Xaa can be any naturally occurring amino acid
  misc_feature (333)..(333): Xaa can be any naturally occurring amino acid
  misc_feature (336)..(336): Xaa can be any naturally occurring amino acid
  misc_feature (344)..(344): Xaa can be any naturally occurring amino acid
  misc_feature (370)..(370): Xaa can be any naturally occurring amino acid
  misc_feature (374)..(374): Xaa can be any naturally occurring amino acid
  misc_feature (443)..(443): Xaa can be any naturally occurring amino acid
  misc_feature (448)..(448): Xaa can be any naturally occurring amino acid
  misc_feature (463)..(463): Xaa can be any naturally occurring amino acid
MGARASVLSGGELDRWEKIRLRPGGRKKYQLKHLVWASRELERFAVNPGLLETSSGCRQILRQLQPALETGSEEXKSLYNTVATLYCVHQRIEVKDTKEALXKIEEEQNKCKEKXQQAAAATGXSSQVSQNYPIVXNXQGQMVHQAISPRXLNAWVKVVEEKAFSPEVIPMFSALSEGATPQDLNTMLNTVGGHQAAMQMLKETINEEAAEWDRXHPVHAGPIAPGQMREPRGSDIAGTTSTLQEQIXWMTHNPPIPVGDIYKRWIIIGLNKIVRMYSPTSILDIRQGPKEPFRDYVDRFYKTLRAEQATQXVKNWMTETLLVQNANPDCKTXLKXLGPAATLXEMMTACQGVGGPGHKARVLAEAMSQXTNSXNIMMQRGNFRNPRKSVKCFNCGKEGHIAKNCKAPRKKGCWKCGKEGHQMKDCTERQANFLGKIWPSHKXRPGNXLQSRPEPTAPPEESXRFGEETATPSQKQGTIDKELYPLTSLRSLFGNDPSSQ

SEQ ID NO: 449 - protein, 502 aa, Human immunodeficiency virus
  misc_feature (114)..(114): Xaa can be any naturally occurring amino acid
  misc_feature (132)..(132): Xaa can be any naturally occurring amino acid
  misc_feature (170)..(170): Xaa can be any naturally occurring amino acid
  misc_feature (190)..(190): Xaa can be any naturally occurring amino acid
  misc_feature (263)..(263): Xaa can be any naturally occurring amino acid
  misc_feature (273)..(273): Xaa can be any naturally occurring amino acid
  misc_feature (280)..(280): Xaa can be any naturally occurring amino acid
  misc_feature (299)..(299): Xaa can be any naturally occurring amino acid
  misc_feature (314)..(314): Xaa can be any naturally occurring amino acid
  misc_feature (391)..(391): Xaa can be any naturally occurring amino acid
  misc_feature (401)..(401): Xaa can be any naturally occurring amino acid
  misc_feature (445)..(445): Xaa can be any naturally occurring amino acid
  misc_feature (497)..(497): Xaa can be any naturally occurring amino acid
MGARASVFSGGELDKWEKIQLRPGGKKRYKLKHLVWASRELERFAVNPGLLETSEGCKQILEQLQPSLQTGSEELKSLYNTVATIYCVHKRIDVRDTKEALDKIEEEQNKSKKXAQQAAAAAAGPGNSQVSXNYPIVQNIQGQMVHQAISPRTLNAWVKVVEEKAFSPEXIPMFSALSEGATPQDLNTMXNTVGGHQAAMQMLKETINEEAAEWDRLHPVHAGPIAPGQMREPRGSDIAGTTSTLQEQINWMTNNPPIPVGEXYKRWIILGLXKIVRMYXPASILDIRQGPKEPFRDYXDRFYKTLRAEQASQXVKNWMTETLLVQNANPDCKTILKALGPAATLEEMMTACQGVGGPGHKARVLAEAMSQVTNSATIMMQKGNFRNQRKXVKCFNCGKEXHIARNCRAPRKKGCWKCGREGHQMKDCTERQANFLGKIWPSHKXRPGNFLQSRPEPTAPPEESFRFGEETTTPPQKQGPMDKELYPLASLRSLFGXDPSSQ

SEQ ID NO: 450 - protein, 508 aa, Human immunodeficiency virus
  misc_feature (109)..(109): Xaa can be any naturally occurring amino acid
  misc_feature (228)..(228): Xaa can be any naturally occurring amino acid
  misc_feature (326)..(326): Xaa can be any naturally occurring amino acid
  misc_feature (330)..(330): Xaa can be any naturally occurring amino acid
  misc_feature (384)..(384): Xaa can be any naturally occurring amino acid
  misc_feature (398)..(398): Xaa can be any naturally occurring amino acid
  misc_feature (405)..(405): Xaa can be any naturally occurring amino acid
  misc_feature (409)..(409): Xaa can be any naturally occurring amino acid
  misc_feature (423)..(423): Xaa can be any naturally occurring amino acid
  misc_feature (478)..(478): Xaa can be any naturally occurring amino acid
MGARASVLSGGKLDKWEKIRLRPGGKKKYKLKHLVWASRELERFAVNPGLLETPEGCRQILGQLQPSLQTGSEELKSLFNTVATLYCVHQMIEIRDTKEALEKIEEEQXQSKKKAQQATADAGKTSQVSQNYPIVQNIQGQMVHQPLSPRTLNAWVKVVEEKAFSPEVIPMFSALSEGATPQDLNTMLNTVGGHQAAMQMLKETINEEAGEWDRLHPVQAGPVAPGQXREPRGSDIAGTTSTLQEQIAWMTHNPPIPVGDIYKRWIILGLNKIVRMYSPTSILDIRQGPKEPFRDYVDRFYKTLRAEQASQEVKNWMTETLLVQNXNPDXKTILKALGPAATLEEMMTACQGVGGPGHKARVLAEAMSQVTNSATIMMQKGNYXNQGKMVKCFNCGKXGHIARNXRAPXKKGCWKCGKEGHQXKDCTERQANFLGKIWPSHKGRPGNFLQNRPEPAAPQNRTEPTAPPEESFRFGEEXITPSQKQEPIDREYPLASLRSLFGNDPSSQ

SEQ ID NO: 451 - protein, 507 aa, Human immunodeficiency virus
MGARASVLSGGKLDQWEKIYLRPGGKKKYKLKHLVWASRELERFAVNPGLLETSEGCRRILGQLQPSLQTGSEELKSLYNTIATLYCVHQRIDVKDTKEALDKIEEEQNKIKKKTQQAAADTGNSSQVSQNYPIVQNLQGQMVHQPISARTLNAWVKVVEEKAFSPEVIPMFTALSEGATPQDLNTMLNTVGGHQAAMQMLKETINEEAAEWDRLHPAQAGPVAPGQMRDPRGSDIAGTTSTLQEQIGWMTSNPPVPVGEIYKRWIILGLNKIVRMYSPTSILDIKQGPKEPFRDYVDRFYKTLRAEQASQDVKNWMTETLLVQNANPDCKTILKALGPAASLEEMMTACQGVGGPSHKARVLAEAMSHVTNSNAIMMQRGNFKNQRKTVKCFNCGKEGHIARNCRAPRKKGCWKCGREGHQMKDCTERQANFLGKIWPSHKGRPGNFLQSRPEPTAPPAEPTAPPEESFRFGEGATAPPQKQEPIDKEMYPLVSLRSLFGSDPSSQ

SEQ ID NO: 452 - protein, 497 aa, Human immunodeficiency virus
  misc_feature (21)..(21): Xaa can be any naturally occurring amino acid
  misc_feature (52)..(52): Xaa can be any naturally occurring amino acid
  misc_feature (114)..(114): Xaa can be any naturally occurring amino acid
  misc_feature (134)..(134): Xaa can be any naturally occurring amino acid
  misc_feature (136)..(136): Xaa can be any naturally occurring amino acid
  misc_feature (138)..(138): Xaa can be any naturally occurring amino acid
  misc_feature (143)..(143): Xaa can be any naturally occurring amino acid
  misc_feature (146)..(146): Xaa can be any naturally occurring amino acid
  misc_feature (216)..(216): Xaa can be any naturally occurring amino acid
  misc_feature (227)..(227): Xaa can be any naturally occurring amino acid
  misc_feature (298)..(298): Xaa can be any naturally occurring amino acid
  misc_feature (307)..(307): Xaa can be any naturally occurring amino acid
  misc_feature (342)..(342): Xaa can be any naturally occurring amino acid
  misc_feature (402)..(402): Xaa can be any naturally occurring amino acid
  misc_feature (444)..(444): Xaa can be any naturally occurring amino acid
  misc_feature (452)..(452): Xaa can be any naturally occurring amino acid
  misc_feature (480)..(480): Xaa can be any naturally occurring amino acid
MGARASILSGGELDRWEKIRXRPGGKKQYRLKHLVWASRELERFAINPGLLXTSEGCRQILRHLHSSLQAGSEELKSLYNTVATLYCVHQRIDIKDTKEALDKIEEEQNKSKKXAQQAAADTGNSSQVSQNYPXVXNXQGQMXYQXLSPRTLNAWVKVVEEKAFSPEVIPMFSALSEGATPGDLNTMLNTVGGHQAAMQMLKETINEEAAEWDRLXPVQAGPIAPGXMREPRGSDIAGTTSTLQEQIGWMTSNPPIPVGEIYKRWIILGLNKIVRMYSPTSILDIKQGPKEPFRDYVXRFYKTLRAXQASQEVKNWMTETLLVQNANPDCKAILRALGPAAXLEEMMTACQGVGGPSHKARVLAEAMSQVTNQATIMMQKGNFRNQRKTVKCFNCGKEGHIXRNCRAPRKKGCWKCGKEGHQMKDCTERQANFLGKIWPSHKGXPGNFPQSXTEPTAPPEESFRFGEETTVPSQKQELIXKNLYPSASLRSLFGNDP

SEQ ID NO: 453 - protein, 502 aa, Human immunodeficiency virus
MGARASVLSGGRLDQWEKIRLRPGGKKKYKLKHIVWASRELERFAVNPGLLETSDGCRKILGQLQPSLQTGSEELKSLYNTIAVLYCVHQGTQVKDTKEALDKIEEEQNKSKKKAQQAAAAADAGNNSPVSQNFPIVQNLQGQMVHQAISPRTLNAWVKVIEEKAFSPEVIPMFSALAEGATPQDLNTMLNTVGGHQAAMQMLKETINEEAAEWDRLHPVHAGPVAPGQMREPRGSDIAGTTSTLQEQIGWMTHNPPIPVGEIYKRWIIMGLNKIVRMYSPVSILDIRQGPKEPFRDYVDRFYKTLRAEQASQEVKNWMTETLLVQNANPDCKTILKALGPAATLEEMMTACQGVGGPSHKARILAEAMSQVTNPTNILMQRGNFKNQRRSVKCFNCGKEGHIARNCRAPRKKGCWKCGKEGHQMKDCTERQANFLGKIWPSHKGRPGNFLQSRPEPTAPPEESFRFGEETTTPSQKQEKIDKEMYPLTSLKSLFGNDPSSQ

SEQ ID NO: 454 - protein, 503 aa, Human immunodeficiency virus
  misc_feature (15)..(15): Xaa can be any naturally occurring amino acid
  misc_feature (49)..(49): Xaa can be any naturally occurring amino acid
  misc_feature (98)..(98): Xaa can be any naturally occurring amino acid
  misc_feature (113)..(113): Xaa can be any naturally occurring amino acid
  misc_feature (115)..(115): Xaa can be any naturally occurring amino acid
  misc_feature (137)..(137): Xaa can be any naturally occurring amino acid
  misc_feature (143)..(143): Xaa can be any naturally occurring amino acid
  misc_feature (166)..(166): Xaa can be any naturally occurring amino acid
  misc_feature (184)..(184): Xaa can be any naturally occurring amino acid
  misc_feature (188)..(188): Xaa can be any naturally occurring amino acid
  misc_feature (290)..(290): Xaa can be any naturally occurring amino acid
  misc_feature (378)..(378): Xaa can be any naturally occurring amino acid
  misc_feature (387)..(387): Xaa can be any naturally occurring amino acid
  misc_feature (390)..(390): Xaa can be any naturally occurring amino acid
  misc_feature (392)..(392): Xaa can be any naturally occurring amino acid
  misc_feature (420)..(420): Xaa can be any naturally occurring amino acid
  misc_feature (449)..(449): Xaa can be any naturally occurring amino acid
MGARASVLSGGQLDXWEKIRLRPGGKKKYQLKHIVWASKELEHFALNPXLLETTEGCRQILGQLQPALRTGTQELKSLYNTVAVLYCVHQRIDIKDTXEALEKIEEEQNKSKXKXQQAAADTGKDNPVSQNYPIVQXAQGQMXHQPISPRTLNAWVKVVEEKAFSXEVIPMFAALSEGATPQDXNTMXNTVGGHQAAMQMLKETINEEAAEWDRLHPVHAGPIAPGQMREPRGSDIAGTTSTLQEQIAWMTNNPPIPVGEIYKKWIIIGLHKIVRMYSPTSILDIKQGPXEPFRDYVDRFYKTLRAEQASQEVKNWMTETLLVQNANPDCKTILKALGPAATLEEMMTACQGVGGPSHKARVLAEAMSQVTNSASANXMMQKGNFRXQRXIXKCFNCGKEGHIARNCKAPRRKGCWKCGXEGHQLKDCTERQANFLGKIWPSHKGRPGXFPQSRLEPTAPPEESFRFGEETATPSQKQESRDKEELYPLASLRSLFGNDPSSQ

SEQ ID NO: 455 - protein, 500 aa, Human immunodeficiency virus
  misc_feature (114)..(114): Xaa can be any naturally occurring amino acid
  misc_feature (152)..(152): Xaa can be any naturally occurring amino acid
  misc_feature (245)..(245): Xaa can be any naturally occurring amino acid
  misc_feature (350)..(350): Xaa can be any naturally occurring amino acid
  misc_feature (369)..(369): Xaa can be any naturally occurring amino acid
  misc_feature (427)..(427): Xaa can be any naturally occurring amino acid
  misc_feature (461)..(461): Xaa can be any naturally occurring amino acid
MGARASVLSGGKLDKWEKIQLRPGGKKRYQLKHIVWASRELERFAVNPGLLETSEGCRKILVQLQPSLQTGSEELKSLYNTVATLYCVHQGVDVRDTKEALDKIEEEQNKSKKXAQAAAADTGNNSQVSQNYPIVQNIQGQMVHQAISPRTXNAWVKVVEEKAFSPEIIPMFTALSEGATPQDLNTMLNTVGGHQAAMQMLKETINEEAAEWDRLHPVQAGPVAPGQVREPRGSDIAGTTSTLQXQIAWMTHNPPIPVGEIYKRWIILGLNKIVRMYSPTSILDIKQGPKESFRDYVDRFYKTLRAEQASQEVKNWMTETLLVQNANPDCKTILKALGPAATLEEMMTAXQGVGGPGHKARVLAEAMSXFTNPANIMMQRGNFKNQRKTVKCFNCGKEGHIARNCRAPRKKGCWKCGKEGHQMKDCXERQANFLGKIWPSHKGRPGNFLQSRPEPSAPPEXSFRFGEETATPSQKQEPIDKELYPSASLRSLFGNDPSSQ

SEQ ID NO: 456 - protein, 500 aa, Human immunodeficiency virus
MGARASVLSGGKLDKWEKIRLRPGGRKKYKLKHLVWASRELERFAVDPGLLETSEGCRQILGQLQPALKTGSEEFRSLYNTVATLYCVHQNIEVKDTKEALEKIEEEQNKSKKKAQQAAAGTGNSSQVSQNYPIVQNLQGQMVHQAISPRTLNAWVKVVEEKAFSPEVIPMFSALSEGATPQDLNTMLNTVGGHQAAMQMLKDTINEEAAEWDRLHPVHAGPIAPGQMREPRGSDIAGTTSTLQEQIGWMTNNPPIPVGEIYKRWIILGLNKIVRMYSPTSILDIRQGPKEPFRDYVDRFYKTLRAEQASQDVKNWMTETLLVQNANPDCRTILKALGPAATLEEMMTACQGVGGPGHKARVLAEAMSQMTNQATIMVQRGNFRNQGRNIKCFNCGKEGHIARNCRAPRKKGCWKCGKEGHQMKECTERQANFLGKIWPSHKGRPGNFLQSRPEPTAPPEESFRFGEETTTPSQKQEPIDKNLYPLTSLKSLFGNDPSSQ

SEQ ID NO: 457 - protein, 502 aa, Human immunodeficiency virus
MGARASVLSGGKLDSWERIRLRPGGKKKYRLKHIVWASRELERFAVNPGLLETAEGCRQILGQLQPALQTGSEELRSLYNTIATLYCVHQRIEVKDTKEALDKIEEEQNKSKKKAQQAADAGTSSQVSQNYPIVQNIQGQMVHQPISPRTLNAWVKVVEEKAFSPEVIPMFSALSEGATPQDLNTMLNTVGGHQAAMQMLKETINEEAADWDRLHPVHAGPIAPGQMREPRGSDIAGTTSTLQEQIGWMTNNPPIPVGEIYKRWIILGLNKIVRMYSPASILDIRQGPKEPFRDYVDRFYKTLRAEQASQEVKNWMTETLLVQNANPDCKTILKALGPAATLEEMMTACQGVGGPGHKARVLAEAMSQVTNSATIMMQKGNFRNQRKAVKCFNCGKEGHVARNCRAPRKRGCWKCGKEGHQMKDCTERQANFLGKIWPSHKGRPGNFPQSRLMPTAPPAPPEESFRFGEEATTPSQRQEPIDKEHYPLTSLRSLFGNDPSSQ

SEQ ID NO: 458 - protein, 507 aa, Human immunodeficiency virus
MGARASVLSGGELDRWEKIRLRPGGSKRYKLKHIVWASRELERFAVNPGLLETSEGCRQILRQLQPSLQTGSEELKSLFNTVATIYCVHQRIDVKDTKEALDKIEEEQNKSKEQNKSKEKAQQAAAGTGNSSQVSSQNYPIVQNLQGQMVHQAISPRTLNAWVKVVEEKAFSPEVIPMFSALSEGATPSDLNTMLNTVGGHQAAMQMLKETINEEAAEWDRLHPVHAGPVAPGQMREPRGSDIAGTTSTLQEQIAWMTSNPPIPVGDIYKRWIILGLNKIVRMYSPTSILDIRQGPKEPFRDYVDRFYKTLRAEQASQEVKNWMTETLLVQNANPDCKTILKALGPAATLEEMMTACQGVGGPGHKARVLAEAMSQVTNSANIMMQRGNFRNQRKTVKCFNCGKEGHIARNCRAPRKKGCWKCGKEGHQMKDCTERQANFLGKIWPSHKGRPGNFLQSRPEPTAPPEESFRFGEETTTPSQKQDPIDKDLYPLASLRSLFGNDPSSQ

SEQ ID NO: 459 - protein, 505 aa, Human immunodeficiency virus
  misc_feature (28)..(28): Xaa can be any naturally occurring amino acid
  misc_feature (113)..(113): Xaa can be any naturally occurring amino acid
  misc_feature (115)..(115): Xaa can be any naturally occurring amino acid
  misc_feature (151)..(151): Xaa can be any naturally occurring amino acid
  misc_feature (156)..(156): Xaa can be any naturally occurring amino acid
  misc_feature (238)..(238): Xaa can be any naturally occurring amino acid
  misc_feature (271)..(271): Xaa can be any naturally occurring amino acid
  misc_feature (274)..(274): Xaa can be any naturally occurring amino acid
  misc_feature (282)..(282): Xaa can be any naturally occurring amino acid
  misc_feature (306)..(306): Xaa can be any naturally occurring amino acid
  misc_feature (309)..(309): Xaa can be any naturally occurring amino acid
  misc_feature (314)..(314): Xaa can be any naturally occurring amino acid
  misc_feature (325)..(325): Xaa can be any naturally occurring amino acid
  misc_feature (340)..(340): Xaa can be any naturally occurring amino acid
  misc_feature (347)..(347): Xaa can be any naturally occurring amino acid
  misc_feature (480)..(480): Xaa can be any naturally occurring amino acid
MGARASILSGGQLDRWEKIRLRPGGKKXYQLKHIVWASRELERFAVNPGLLETAEGCRQILGQLQPSLQTGSEELKSLFNTVAVLFCVHQRIDVKDTKEALDKIEEEQNKSKXKXQQAAADTGNTGNSNQVSQNYPIVQNLQGQMVHQAIXPRTLXAWVKVVEEKAFSPEVIPMFSALSEGATPQDLNTMLNTVGGHQAAMQMLKETINEEAAEWDRLHPVHAGPIAPGQMREPRGSXIAGTTSTLQEQIGWMTNNPPIPVGEIYKRWIIXGLXKIVRMYSXTSILDIKQGPKEPFRDYVDRFYKXLRXEQASXEVKNWMTETLXVQNANPDCKTILKAXGPAATLXEMMTACQGVGGPGHKARVLAEAMSQVHPVNIMMQRGNFKNQRKTIKCFNCGKEGHLARNCRAPRKKGCWKCGKEGHQMKDCTERQANFLGKIWPSHKGRPGNFLQSRPEPTAPPAPPEESFRFGEETTTPPQXQEPIDKELYPLASLKSLFGNDPLSQ

SEQ ID NO: 460 - protein, 500 aa, Human immunodeficiency virus
  misc_feature (53)..(53): Xaa can be any naturally occurring amino acid
  misc_feature (224)..(224): Xaa can be any naturally occurring amino acid
MGARASILRGEKLDKWEKIQLRPGGKKRYQLKHLIWASRELERFAVNPGLLEXSAGCRQILGQLQSSLQTGTEELRSLFNTVAVLYCVHQRIEIRDTKEALDKVEEEQNKGKVKTQQAAADTGSSSKVSQNYPIVQNLQGQMVHQPLTPRTLNAWVKVVEEKAFSPEVIPMFTALSEGATPQDLNTMLNTVGGHQAAMQMLKETINEEAAEWDRVHPVHAGPIXPGQMREPRGSDIAGTTSTLQEQIGWMTSNPPIPVGEIYKRWIILGLNKIVRMYSPTSILDIKQGPKEPFRDYVDRFYKTLRAEQASQDVKNWMTETLLVQNANPDCKIILKSLGPGASLEEMMTACQGVGGPSHKARVLAEAMSQVTNSNTIMMQRGNFRNQRKTVKCFNCGKEGHIARNCRAPRKKGCWKCGNEGHQMKDCTERQANFLGKIWPSHKGRPGNFLQSRPEPSAPPEESFRFGEETTPPSQKQEQTDKELYPLASLRSLFGNDPSSQ

SEQ ID NO: 461 - protein, 502 aa, Human immunodeficiency virus
  misc_feature (226)..(226): Xaa can be any naturally occurring amino acid
  misc_feature (444)..(444): Xaa can be any naturally occurring amino acid
MGARASVLSGGELDKWEKIRLRPGGKKKYKLKHIVWAGRELERYAVNPGLLETSGGCRQIMEQLQPALQTGSEELKSLYNTVATLYCVHQKIEIRDTKEALDKIEEEQNKSKKKAQQAAAAADTGNSSKVSQNYPIVQNFQGQMVHQAISPRTLNAWVKVIEEKAFSPEVIPMFTALSEGATPQDLNTMLNTVGGHQAAMQMLKETINEEAAEWDRLHPAQAGPVXPGQIRDPRGSDIAGTTSTLQEQIDWMTRNPPVPVGEIYKRWIILGLNKIVRMYSPTSILDIKQGPKEPFRDYVDRFYKTLRAEQASQEVKNWMTETLLVQNANPDCKTILKALGPAATLEEMMTACQGVGGPGHKARVLAEAMSQVTNSATIMMQRGNFRNQKKNVKCFNCGKEGHIARNCRAPRKKGCWKCGREGHQMKDCTERQANFLGKIWPSHXGRPGNFLQSRPEPTAPPEESFRFGEGTTTPPQKQETIDKDLYPLASLKSLFGNDPLSQ

SEQ ID NO: 462 - protein, 500 aa, Human immunodeficiency virus
  misc_feature (68)..(68): Xaa can be any naturally occurring amino acid
  misc_feature (227)..(227): Xaa can be any naturally occurring amino acid
  misc_feature (230)..(230): Xaa can be any naturally occurring amino acid
  misc_feature (307)..(307): Xaa can be any naturally occurring amino acid
  misc_feature (460)..(460): Xaa can be any naturally occurring amino acid
  misc_feature (474)..(474): Xaa can be any naturally occurring amino acid
MGARASVLSGGELDRWEKIRLRPGGKKKYRLKHIVWASRELERFAVNPGLLETSEGCRQILRQLQPAXQTGSEELKSLYNTVATLYCVHQRIEVKDTKEALEKIEEEQDKSKKKAQQAAADTGNSSQVSQNYPIVQNLQGQMVHQAISPRTLNAWVKVVEEKAFSPEVIPMFTALSEGATPQDLNTMLNTVGGHQAAMQMLKETINEEAAEWDRLHPVQAGPVAPGXMRXPRGSDIAGTTSTLQEQIGWMTSNPPIPVGEIYKRWIILGLNKIVRMYSPASILDIRQGPKEPFRDYVDRFYKTLRAXQASQEVKNWMTETLLVQNANPDCKTILKALGPAATLEEMMTACQGVGGPGHKARVLAEAMSQVTNSATIMMQKGNFRNQRKVVKCFNCGKEGHIARNCRAPRKRGCWKCGKEGHQMKDCTERQANFLGKIWPSHKGRPGNFLQSRPEPTAPPXESFRFGEETATPPXKQEPIDKELYPLASLRSLFGNDPSSP

SEQ ID NO: 463 - protein, 504 aa, Human immunodeficiency virus
  misc_feature (143)..(143): Xaa can be any naturally occurring amino acid
  misc_feature (404)..(404): Xaa can be any naturally occurring amino acid
  misc_feature (442)..(442): Xaa can be any naturally occurring amino acid
  misc_feature (471)..(471): Xaa can be any naturally occurring amino acid
  misc_feature (474)..(474): Xaa can be any naturally occurring amino acid
  misc_feature (477)..(477): Xaa can be any naturally occurring amino acid
  misc_feature (481)..(481): Xaa can be any naturally occurring amino acid
MGARASVLSGGDLDRWEKIRLRPGGKKQYKLKHIVWASRELERFAVNPGLLETAEGCRKILEQLQPSLQTGSEELKSLHNTVAVLYCVHQRIEVKDTKEALDKIEEERNKSKKKAQQPAADTGSHNQVSQNYPIVQNMQGQMXHQPISPRTLNAWVKVVEEKAFNPEVIPMFSALSEGATPQDLNTMLNTVGGHQAAMQMLKETINEEAAEWDRMHPVHAGPVAPGQMREPRGSDIAGTTSTLQEQIGWMTSNPPVPVGEIYKRWIILGLNKIVRMYSPISILDIRQGPKEPFREYVDRFYKTLRAEQASQDVKNWMTETLLVQNANPDCKTILKALGPGATLEEMMTACQGVGGPAHKARVLAEAMSQVTQPAAVMMQRGNFKNQKRIVKCYNCGKEGHIAKXCRAPRKKGCWKCGGEGHQMKDCTERQANFLGKFWPSHXGRPGNFLQNSPEPTAPPAPPEESFRFGEXIAXPSXKQEXKGKELYPPLASLRSLFGNDPSSQ

SEQ ID NO: 464 - protein, 500 aa, Human immunodeficiency virus
MGARASVLSGGDLDRWEKIRLRPGGKKKYQLKHIVWASRELERFAVNPGLLETSEGCRQILGQLQPSLQTGSEELKSLFNTIATLYCVHQKIDVKDTKEALEKIEEEQNKSKKKAQQATADTGNSSQVSRNYPIVQNIQGQMVHQPLSPRTLNAWVKVVEEKSFSPEVIPMFSALSEGATPQDLNTMLNTIGGHQAAMQMLKETINEEAAEWDRLHPVHAGPIAPGQMREPRGSDIAGTTSNLQEQIAWMTNNPPIPVGEIYKRWIILGLHKIVRMYSPTSILDIKQGPKEPFRDYVDRFYKTLRAEQASQEVKNWMTETLLVQNANPDCKTILKALGPAATLEEMMTACQGVGGPGHKARVLAEAMSQVTNSTTIMMQKGNFRNHRKIVKCFNCGKEGHIAKNCRAPRKRGCWKCGKEGHQMKDCTERQANFLGKIWPSYKGRPGNFLQSRPEPTAPPEESFRFGEETTTPSQKQDLIDKELHPLASLKSLFGNDPSSQ

SEQ ID NO: 465 - protein, 500 aa, Human immunodeficiency virus
  misc_feature (17)..(17): Xaa can be any naturally occurring amino acid
  misc_feature (66)..(66): Xaa can be any naturally occurring amino acid
  misc_feature (82)..(82): Xaa can be any naturally occurring amino acid
  misc_feature (88)..(88): Xaa can be any naturally occurring amino acid
  misc_feature (167)..(167): Xaa can be any naturally occurring amino acid
  misc_feature (175)..(175): Xaa can be any naturally occurring amino acid
  misc_feature (211)..(211): Xaa can be any naturally occurring amino acid
  misc_feature (406)..(406): Xaa can be any naturally occurring amino acid
  misc_feature (408)..(408): Xaa can be any naturally occurring amino acid
  misc_feature (452)..(452): Xaa can be any naturally occurring amino acid
  misc_feature (471)..(471): Xaa can be any naturally occurring amino acid
MGARASVLSGGKLDKWXKIRLRPGGRKKYQLKHIVWASRELERFAVNPGLLETAEGCRQILGQLQXSLQTGSEELKSLYNTXAVLYCXHQNIEVKDTKEALDQIEEEQNKSKKKAQQAAASTGNSGQISQNYPIVQNLQGQMVHQAISPRTLNAWVKVVEEKAFSPXVIPMFTAXSEGATPQDLNTMLNTVGGHQAAMQMLKETINEEAAXWDRIHPVHAGPIAPGQMREPRGSDIAGTTSTLQEQIGWMTSNPPIPVGEIYKRWIILGLNKIVRMYSPTSILDIRQGPKEPFRDYVDRFYKTLRAEQASQEVKNWMTETLLVQNSNPDCRTILKALGPAATLEEMMTACQGVGGPGHKARVLAEAMSQATNQASIMMQRGNFRNQRKSVKCFNCGKEGHIAKNCXAXRRKGCWKCGKEGHQMKDCTERQANFLGKIWPSHKGRPGNFLQSXPEPTAPPEESFRFGGETTXPSQKQEQTKEELYPLTSLKSLFGNDPSSQ

SEQ ID NO: 466 - protein, 501 aa, Human immunodeficiency virus
MGARASVLSGGELDKWEKIRLRPGGKKKYKLKHIVWASRELERFAVNPSLLETAAGCRQILAQLQPSLQTGSEELKSLHNTIATLYCVHQRIDVKDTKEALDRIEEEQNKSKKKAQQAAADTGNNSSQVSQNYPIVQNMQGQMVHQAISPRTLNAWVKVIEEKAFSPEVIPMFSALSEGATPQDLNTMLNTVGGHQAAMQMLKETINEEAAEWDRVHPVHAGPVAPGQMREPRGSDIAGTTSTLQEQIGWMTNNPPIPVGEIYKRWIILGLNKIVRMYSPVSILDIRQGPKEPFRDYVDRFYKTLRAEQATQEVKNWMTETLLVQNANPDCKTILKALGPAATLEEMMTACQGVGGPGHKARVLAEAMSQVTNANTIMMQRGNFRNQRKTVKCFNCGKEGHIAKNCRAPRKKGCWKCGREGHQMKDCTERQANFLGKIWPSHKGRPGNFLQSRPEPSAPPAESFRFGEETTTPPQKQEPIDKELYPLASLKSLFGSDPLSQ

SEQ ID NO: 467 - protein, 502 aa, Human immunodeficiency virus
  misc_feature (38)..(38): Xaa can be any naturally occurring amino acid
  misc_feature (462)..(462): Xaa can be any naturally occurring amino acid
  misc_feature (467)..(467): Xaa can be any naturally occurring amino acid
MGARASVLSAGELDKWEKIRLRPGGKKKYRLKHIVWAXRELERFAVNPGLLETSEGCRQILGQLQPSLQTGSEELRSLFNTIATLYCVHQKIEVKDTKEALEKVEEEQNKSKKKAQQAAAGTGNSSQTSQNFPIVQNLQGQMVHNPLSPRTLNAWVKVIEDKAFSPEVIPMFTALSEGATPQDLNTMLNTVGGHQAAMQMLKETINEEAAEWDRLHPVQAGPIAPGQIREPRGSDIAGTTSNLQEQITWMTGNPPIPVGDIYKRWIIIGLNKIVRMYSPVSILDIRQGPKEPFRDYVDRFYKTLRAEQASQDVKNWMTETLLVQNANPDCKTILKALGPGASLEEMMTACQGVGGPAHKARVLAEAMSQANSTTIMMQRGNFRGQRKIIKCFNCGKEGHIAKNCRAPRKKGCWRCGKEGHQMKDCTERQANFLGKIWPSHKGRPGNFLQSRPEPTAPPAPPXESFRXGEGTTTPSQKQETIDKELYPLASLKSLFGNDPSSQ

SEQ ID NO: 468 - protein, 508 aa, Human immunodeficiency virus
  misc_feature (79)..(79): Xaa can be any naturally occurring amino acid
  misc_feature (115)..(115): Xaa can be any naturally occurring amino acid
  misc_feature (179)..(179): Xaa can be any naturally occurring amino acid
  misc_feature (189)..(189): Xaa can be any naturally occurring amino acid
  misc_feature (202)..(202): Xaa can be any naturally occurring amino acid
  misc_feature (292)..(292): Xaa can be any naturally occurring amino acid
  misc_feature (297)..(297): Xaa can be any naturally occurring amino acid
  misc_feature (342)..(342): Xaa can be any naturally occurring amino acid
  misc_feature (395)..(395): Xaa can be any naturally occurring amino acid
MGARASVLSGEKLDRWEKIRLRPGGKKQYKLKHIVWASRELERFAVNPGLLETSEGCRQILGQLQPSLQTGSEELKSLXNTVATLYCVHQRIEVKDTKEALDKIEEEQNKSKKKXQQAAADTGNSTGNSSSQVSQNYPIVQNLQGQMVHQALSPRTLNAWVKVVEEKAFSPEVIPMFTXLSEGATPQDXNTMLNTVGGHQAXMQMLKETINEEAAEWDRLHPVHAGPVAPGQMREPRGSDIAGTTSTLQEQIGWMTNNPPIPVGEIYKRWIILGLNKIVRMYSPTSILDIKXGPKEXFRDYVDRFYKTLRAEQASQEVKNWMTETLLVQNANPDCKTILKAXGPAATLEEMMTACQGVGGPGHKARVLAEAMSQATNSAAAIMMQRGKFKNQRKXVKCFNCGKEGHIARNCRAPRKKGCWKCGKEGHQMKDCTERQANFLGKIWPSHKGRPGNFLQSRPEPTAPTAPPEESFRFGEETTAPSQKQEPIDKEVYPLASLKSLFGNDPSS

SEQ ID NO: 469 - protein, 499 aa, Human immunodeficiency virus
  misc_feature (39)..(39): Xaa can be any naturally occurring amino acid
  misc_feature (43)..(43): Xaa can be any naturally occurring amino acid
  misc_feature (182)..(182): Xaa can be any naturally occurring amino acid
  misc_feature (193)..(193): Xaa can be any naturally occurring amino acid
  misc_feature (231)..(231): Xaa can be any naturally occurring amino acid
MGARASVLSGGELDKWEKIRLRPGGKKKYQLKHIVWASXELEXFAVNPGLLETAAGCRQILGQLHPSLQTGSEELKSLYNTVATLYCVHQKIEVRDTKEALDKVEEEQNKSKKKAQQAADTGNSSQVSQNYPIVQNLQGQMVHQPISPRTLNAWVKVVEEKAFSPEVIPMFSALSEGATPQXLNTMLNTVGGXQAAMQMLKETINEEAAEWDRLHPPQAGPIAPGQIREPXGSDIAGSTSNLQEQVRWMTSNPPIPVGEIYKRWIILGLNKIVRMYSPTSILDIKQGPKEPFRDYVDRFYRTLRAEQASQEVKNWMTETLLVQNANPDCKTILKALGPAATLEEMMTACQGVGGPAHKARVLAEAMSHVTGANAIMMQKGNFKSQRKTVKCFNCGKEGHIAKNCRAPRKKGCWKCGREGHQMKDCTERQANFLGKIWPSHKGRPGNFLQSRPEPTAPPEESFRFGEEAAAPPQKQEPIDKELYPLASLKSLFGNDPSSQ

SEQ ID NO: 470 - protein, 500 aa, Human immunodeficiency virus
MGARASVLSAGELDKWEKIRLRPGGKKKYRLKHIVWASRELERFAVNPGLLETAEGCKQILGQLQSSLQTGSEELKSLFNLVAVLWCVHQKIDVKDTKEALDKIEEEKNKSKKKAQQAAADTGNSNQVSQNYPIVQNLQGQMVHQAISPRTLNAWVKVVEEKAFSPEVIPMFAALSEGATPQDLNTMLNTVGGHQAAMQMLKETINEEAAEWDRLHPVHAGPIAPGQMREPRGSDIAGTTSTLQEQIGWMTSNPPIQVGEIYKRWIILGLNKIVRMYSPTSILDIRQGPKEPFRDYVDRFYKTLRAEQATQEVKNWMTETLLVQNANPDCKTILKALGPAATLEEMMTACQGVGGPGHKARVLAEAMSQVTNSPAIMMQRGNFRNQRKTVKCFNCGKEGHIAKNCRAPRKKGCWKCGREGHQMKDCTERQANFLGKIWPSHKGRPGNFPQSKIEPTAPPEESFRFGEETTTPPQKQEPIDKELYPLASLRSLFGNDPSSQ

SEQ ID NO: 471 - protein, 508 aa, Human immunodeficiency virus
MGARASVLSGGQLDKWEKIRLRPGGKKKYQLKHLVWASRELERFAVNPGLLETAGGCRQILGQLHPSLQTGSEELRSLYNTIATLYCVHQNIEVKDTKEALEKIEEEQNKSKKKAQQAAADTANSSQVSQVSQNYPIVQNLQGQMVHQAISPRTLNAWVKVIEEKAFSPEVIPMFSALSEGATPQDLNTMLNTVGGHQAAMQMLKETINEEAAEWDRLHPAQAGPVAPGQIRDPRGSDIAGTTSNLQEQITWMTSNPPIPVGEIYKRWIILGLNKIVRMYSPVSILDIRQGPKEPFRDYVDRFYKTLRAEQASQEVKGWMTETLLVQNANPDCKTILKALGPAATLEEMMTACQGVGGPSHKARILAEAMSQVTSSATIMMQRGNFRNQRKTIKCFNCGKEGHLAKNCRAPRKRGCWKCGKEGHQMKDCNERQANFLGRIWPSSKGRPGNFLQSRPEPTAPPEESFRFGEETTTPSQKQELIDKEPIDKETYPLASLRSLFGNDPLSQ

SEQ ID NO: 472 - protein, 512 aa, Human immunodeficiency virus
MGARASVLSGGELDRWEKIRLRPGGKKRYKLKHIVWASRELERFAVNPSLLETSEGCRQILRQLQPSLQTGSEEIKSLYNTVATLYCVHQRIDVKDTKEALDKIEEEQNKSKKKAQPAAAADTENSSQVSQNYPIVQNMQGQMVHQAISPRTLNAWVKVVEEKAFSPEVIPMFSALSEGATPQDLNTMLNTVGGHQAAMQMLKETINEEAAEWDRLHPVHAGPIAPGQMREPRGSDIAGTTSTLQEQIGWMTHNPPIPVGEIYKRWIILGLNKIVRMYSPTSILDIRQGPKEPFRDYVDRFYKTLRAEQASQEVKNWMTETLLVQNANPDCKTILKALGPAATLEEMMTACQGVGGPGHKARVLAEAMSQVTSPANIMMQRGNFRNQRKIIKCFNCGKEGHIAKNCRAPRKKGCWKCGKEGHQMKECTERQANFLGKIWPSHKGRPGNFLQSRPEPTAPPAQSRPEPTAPPAESFRFGEETATPSQKQETVDKEVYPLASLKSLFGSDPLLQ

SEQ ID NO: 473 - protein, 500 aa, Human immunodeficiency virus
MGARASVLRGGQLDTWEKIRLRPGGKKQYRLKHLVWASRELERFAINPGLLETAEGCRQIIGQLQPALQTGSEEVKSLFNTVATLYCVHQNIEVRDTKEALDKIEEEQNKSKKKAQQAAADTGNSSQVSQNYPIVQNLQGQMVHQAITPRTLNAWVKVVEEKAFSPEVIPMFSALSEGCTPQDLNLMLNTVGGHQAAMQMLKETINEEAAEWDRMHPVQAGPVAPGQIREPRGSDIAGTTSNLQEQITWMTSNPPIPVGEIYKRWIILGLNKIVRMYSPTSILDIRQGPKEPFRDYVDRFYKTLRAEQASQEVKNWMTETLLVQNANPDCKTILKALGPAATLEEMMTACQGVGGPGHKARVLAEAMSQVTNPAAIMMQKGNFRHQRKTVKCFNCGKEGHIAKNCRAPRKKGCWKCGKEGHQMKDCTERQANFLGKIWPSRRGGPGNFPQGRLEPTAPPEESFRFGEETTTPPQKQDPIDKEMYPLASLRSLFGNDPSSQ

SEQ ID NO: 474 - protein, 499 aa, Human immunodeficiency virus
MGARASVLSGGELDKWEKIRLRPGGRKQYKLKHIVWASRELERFAVNPGLLETSEGCRQILGQLQPSLQTGSEELNSLSNTIAVLYCVHQRIDIKDTKEALDKIEEEQNKSKKKVQQAAADTGNSNQVSQNYPIVQNVQGQMVHQAISPRTLNAWVKVVEEKAFSPEVIPMFSALSEGATPSDLNTMLNTVGGHQAAMQMLKETINEEAAEWDRLHPVHAGPIAPGQMREPRGSDIAGTTSTLQEQIAWMTNNPPIPVGDIYKRWIILGLNKIVRMYSPTSILDIRQGPKEPFRDYVDRFYKTLRAEQASQDVKNWMTETLLVQNANPDCKTILKALGPAATLEEMMTACQGVGGPGHKARVLAEAMSQASNATNIMMQRGNFRTQRRIVRCFNCGKEGHIAKNCRAPRKKGCWRCGKEGHQMKDCSERQANFLGKIWPSHKGRPGNFLQSRPEPTAPPEESFRFGEETTPPQKQEAIDKELYPLASLKSLFGSDPSSQ

SEQ ID NO: 475 - protein, 500 aa, Human immunodeficiency virus
  misc_feature (23)..(23): Xaa can be any naturally occurring amino acid
  misc_feature (26)..(26): Xaa can be any naturally occurring amino acid
  misc_feature (40)..(40): Xaa can be any naturally occurring amino acid
  misc_feature (51)..(51): Xaa can be any naturally occurring amino acid
  misc_feature (104)..(104): Xaa can be any naturally occurring amino acid
  misc_feature (489)..(489): Xaa can be any naturally occurring amino acid
MGARASVLSGGKLDKWERIRLRXGGXKRYKLKHIVWASRXLERFAVNPGLXETSEGCKQILIQLQPSLKTGSEELKSLFNTVATLYCVHQGIEVRDTKEALDKXEEEQNKGKKKAQQAQQAAADTGNNSQVSQNYPIVQNIQGQMVHQPLSPRTLNAWVKVIEDKAFSPEVIPMFTALSEGATPQDLNTMLNTVGGHQAAMQMLKETINEEAAEWDRLHPVQAGPVAPGQMREPRGSDIAGTTSTLQEQIGWMTSNPPIPVGEIYKRWIILGLNKIVRMYSPVSILDIRQGPKEPFRDYVDRFYKTLRAEQASQDVKNWMTETLLVQNANPDCKTILKALGPGASLEEMMTACQGVGGPSHKARVLAEAMSQATNQNTIMMQRGTFRNQRKTVKCFNCGKEGHIARNCRAPRKKGCWKCGQEGHQMKDCTERQANFLGRIWPSHKGRPGNFLQSRPEPSAPPAESFGFGEEGTTPPQKQEQKDKELYPXASLRSLFGNDP

SEQ ID NO: 476 - protein, 506 aa, Human immunodeficiency virus
  misc_feature (230)..(230): Xaa can be any naturally occurring amino acid
  misc_feature (438)..(438): Xaa can be any naturally occurring amino acid
MGARASVLSGGKLDHWEKIRLRPGGKKKYKLKHIVWASRELERFAVNPGLLETAEGCRQILGQLQPALQTGSEELKSLYNTVAVLYCVHQRIEIKDTKEALDKIEEEQNKSKKKAQQAAAAAADTGNSSQVSQNYPIVQNLQGQMVHQALSPRTLNAWVKVIEERAFSPEIIPMFSALSEGATPQDLNTMLNTVGGHQAAMQMLKETINEEAADWDRLHPVHAGPAAPGXMREPRGSDIAGTTSTLQEQIGWMTSNPAIPVGEIYKRWIILGLNKIVRMYSPTSILDIKQGPKEPFRDYVDRFYKTLRAEQASQDVKNWMTETLLVQNANPDCKTILKALGPAATLEEMMTACQGVGGPSHKARILAEAMSQVTNQSTIMIQRGNFRGQGKIVKCFNCGKVGHIARNCRAPRKRGCWKCGKEGHQMKECTEGQANFLXKIWPSHKGRPGNFLQSRPEPTAPPEPTAPPAESFRFGEETTTPSQKQEPIDKELYPLTSLRSLFGNDH

SEQ ID NO: 477 - protein, 500 aa, Human immunodeficiency virus
  misc_feature (10)..(10): Xaa can be any naturally occurring amino acid
  misc_feature (13)..(13): Xaa can be any naturally occurring amino acid
  misc_feature (26)..(26): Xaa can be any naturally occurring amino acid
  misc_feature (61)..(61): Xaa can be any naturally occurring amino acid
  misc_feature (135)..(135): Xaa can be any naturally occurring amino acid
  misc_feature (331)..(331): Xaa can be any naturally occurring amino acid
MGARASVLSXGEXDRWEKIRLRPGGXKRYRLKHLVWASRELERFAVNPGLLETSEGCRLIXNQLQPSLQTGSEELKSLYNTVATIYCVHQRIDVKDTKEALEKIEEEQNKSKKKAQQAAADTGNTSQVSQNYPIXQNLQGQMVHQAISPRTLNAWVKVIEEKAFSPEVIPMFSALSEGATPQDLNTMLNTVGGHQAAMQMLKETINEEAAEWDRVHPVHAGPVAPGQMREPRGSDIAGTTSTLQEQIGWMTNNPPIPVGEIYKRWIILGLNKIVRMYSPISILDIKQGPKEPFRDYVDRFYKTLRAEQATQEVKNWMTETLLVQNANPDCXTILKALGPAATLEEMMTACQGVGGPGHKARVLAEAMSQVTNSATIMMQRGNFRNQRKTVKCFNCGKEGHIARNCRAPRKKGCWKCGKEGHQMKDCTERQANFLGKIWPSSKGRPGNFLQSRPEPTAPPEEIFRFGKETTTPSQKQEPIDKEGSPLASLKSLFGNDPSSQ

SEQ ID NO: 478 - protein, 502 aa, Human immunodeficiency virus
  misc_feature (64)..(64): Xaa can be any naturally occurring amino acid
  misc_feature (74)..(74): Xaa can be any naturally occurring amino acid
  misc_feature (76)..(76): Xaa can be any naturally occurring amino acid
  misc_feature (90)..(90): Xaa can be any naturally occurring amino acid
  misc_feature (95)..(95): Xaa can be any naturally occurring amino acid
  misc_feature (111)..(111): Xaa can be any naturally occurring amino acid
  misc_feature (115)..(115): Xaa can be any naturally occurring amino acid
  misc_feature (126)..(126): Xaa can be any naturally occurring amino acid
  misc_feature (128)..(128): Xaa can be any naturally occurring amino acid
  misc_feature (139)..(139): Xaa can be any naturally occurring amino acid
  misc_feature (220)..(220): Xaa can be any naturally occurring amino acid
  misc_feature (307)..(307): Xaa can be any naturally occurring amino acid
  misc_feature (323)..(323): Xaa can be any naturally occurring amino acid
  misc_feature (377)..(377): Xaa can be any naturally occurring amino acid
  misc_feature (421)..(421): Xaa can be any naturally occurring amino acid
  misc_feature (445)..(445): Xaa can be any naturally occurring amino acid
  misc_feature (485)..(485): Xaa can be any naturally occurring amino acid
  misc_feature (489)..(489): Xaa can be any naturally occurring amino acid
  misc_feature (492)..(492): Xaa can be any naturally occurring amino acid
MGARASVLSGGKLDRWEKIRLRPGGKKKYQLKHIVWASRELERFALNPGLLETSEGCKQILGQXHPSLQTGSEXLXSLYNTIATLYCVHXNIEVXDTKEALEKVEEEQNQXKKKXQQAAAATGNSXSXVSQNYPIVQNXQGQMVHQAISPRTLNAWVKVVEEKAFSPEVIPMFSALSEGATPQDLNTMLNTVGGHQAAMQMLKETINEEAAEWDRLHPVXAGPVAPGQMREPRGSDIAGTTSTLQEQIGWMTNNPPIPVGEIYKRWIILGLNKIVRMYSPASILDIRQGPKEPFRDYVDRFYKTLRXEQASQEVKNWMTETLXVQNANPDCKTILKALGPGATLEEMMTACQGVGGPGHKARVLAEAMSQVTNSANXIMMQRGNFRNQRKNVKCFNCGKEGHIARNCRAPRKKGCWKCGKXGHQMKDCTERQANFLGKIWPSHKXRPGNFLQSRPEPTAPPEESFRFGEETTTPSQKQEPRDKEXYPLXSLXSLFGNDPSSQ

SEQ ID NO: 479 - protein, 506 aa, Human immunodeficiency virus
  misc_feature (11)..(11): Xaa can be any naturally occurring amino acid
  misc_feature (161)..(161): Xaa can be any naturally occurring amino acid
  misc_feature (183)..(183): Xaa can be any naturally occurring amino acid
  misc_feature (188)..(188): Xaa can be any naturally occurring amino acid
  misc_feature (228)..(228): Xaa can be any naturally occurring amino acid
  misc_feature (330)..(330): Xaa can be any naturally occurring amino acid
  misc_feature (337)..(337): Xaa can be any naturally occurring amino acid
  misc_feature (361)..(361): Xaa can be any naturally occurring amino acid
  misc_feature (363)..(363): Xaa can be any naturally occurring amino acid
  misc_feature (484)..(484): Xaa can be any naturally occurring amino acid
MGARASVLSGXQLDRWEKIRLRPGGRKQYKLKHIVWASRELERFALNPGLLETSEGCRQILGQLQPSLQTGSEELRSLFNTVATLYCVHQRIEVKDTKEALEKIEEEQNKSKKKVQQAAADTGNNSPVSQNYPIVQNMQGQMVHQAISPRTLNAWVKVVEXKAFSPEVIPMFSALSEGATPQXLNTMXNTVGGHQAAMQMLKETINEEAAEWDRLHPVHAGPPAPGQXREPRGSDIAGTTSTLQEQIGWMTNNPPIPVGEIYKRWIIMGLNKIVRMYSPTSILDIRQGPKEPFRDYVDRFYKTLRAEQASQEVKNWMTETLLVQNSNPDXKTILKAXGPAATLEEMMTACQGVGGPGHKAXIXAEAMSQVTSSATIMMQKGNFRNQRKPIKCFNCGKEGHIARNCKAPRKKGCWKCGSEGHQMKDCTGRQANFLGKIWPSHKGRPGNFLQSRPEPTAPPEPTAPPAESFRFGGETTTPPQKQEXIDKELYPLASLKSLFGNDPSSQ

SEQ ID NO: 480 - protein, 503 aa, Human immunodeficiency virus
  misc_feature (35)..(35): Xaa can be any naturally occurring amino acid
  misc_feature (78)..(78): Xaa can be any naturally occurring amino acid
  misc_feature (94)..(94): Xaa can be any naturally occurring amino acid
  misc_feature (112)..(112): Xaa can be any naturally occurring amino acid
  misc_feature (120)..(120): Xaa can be any naturally occurring amino acid
  misc_feature (127)..(127): Xaa can be any naturally occurring amino acid
  misc_feature (164)..(164): Xaa can be any naturally occurring amino acid
  misc_feature (206)..(206): Xaa can be any naturally occurring amino acid
  misc_feature (308)..(308): Xaa can be any naturally occurring amino acid
  misc_feature (364)..(364): Xaa can be any naturally occurring amino acid
  misc_feature (431)..(431): Xaa can be any naturally occurring amino acid
  misc_feature (453)..(453): Xaa can be any naturally occurring amino acid
  misc_feature (459)..(459): Xaa can be any naturally occurring amino acid
MGARASVLSGGKLDKWEKIRLRPGGKKQYRLKHIXWASRELERFAINPGLLETSGGCRQILEQLQPSLKTGSEELRSXFNTIATLYCVHQNIEXKDTKEALDKIEEEQNKSXKKAQQAAXDTGNSSXQVSQNYPIVQNMQGQMVHQALSPRTLNAWVKVVEEKXFSPEVIPMFSALSEGATPQDLNTMLNTVGGHQAAMQMLKETXNEEAAEWDRLHPVHAGPIAPGQMREPRGSDIAGTTSTLQEQIGWMTHNPPIPVGEIYKRWIILGLNKIVRMYSPVSILDIRQGPKEPFRDYVDRFYRTLRAXQASQDVKNWMTETLLVQNANPDCKTILKALGPAATLEEMMTACQGVGGPGHKARVXAEAMSLVNPTTIMMQRGNFRNQRKIVKCFNCGKEGHIAKNCRAPRKKGCWKCGKEGHQMKECTERQXNFLGKIWPSHKGRPGNFLQSRXEPTAPXEPTAPPEESFRFGEETTAPSQKQEPIDKEKYPLASLRSLFGNDP

SEQ ID NO: 481 - protein, 497 aa, Human immunodeficiency virus
MGARASILSGGELDRWEKIRLRPGGKKKYKLKHVVWASRELEKFAINPGLLETSEGCRQILGQLQSALKTGSEEFKSLYNTVAVLYCVHEKIDVKDTKEALEKIEEEQNKSKKKAQQAAADTGNRNPVSQNYPIVQNLQGQMVHQAISPRTLNAWVKVVEEKAFSPEVIPMFSALSEGATPQDLNTMLNTVGGHQAAMQMLKETINEEAAEWDRLHPVPAGPVAPGQIRDPRGSDIAGTTSTLQEQIAWMTNNPPIPVGEIYKRWIIMGLNKIVRMYSPTSILDIRQGPKEPFRDYVDRFYKTLRAEQASQEVKNWMTETLLVQNANPDCKTILKALGPNPTLEEMMTACQGVGGPSHKARVLAEAMSQATNSATIMMQRGNPRTQRKMVKCFNCGKEGHIAKNCRAPRKKGCWKCGKEGHQMKDCTERQANFLGKIWPSSRGRPGNFPQSRLEPTAPPEESLRKETATPPQKQETRDELYPLTSLRSLFGNDPSSQ

SEQ ID NO: 482 - protein, 500 aa, Human immunodeficiency virus
  misc_feature (22)..(22): Xaa can be any naturally occurring amino acid
  misc_feature (40)..(40): Xaa can be any naturally occurring amino acid
  misc_feature (58)..(58): Xaa can be any naturally occurring amino acid
  misc_feature (109)..(109): Xaa can be any naturally occurring amino acid
  misc_feature (118)..(118): Xaa can be any naturally occurring amino acid
  misc_feature (121)..(121): Xaa can be any naturally occurring amino acid
  misc_feature (146)..(146): Xaa can be any naturally occurring amino acid
  misc_feature (148)..(148): Xaa can be any naturally occurring amino acid
  misc_feature (164)..(164): Xaa can be any naturally occurring amino acid
  misc_feature (168)..(168): Xaa can be any naturally occurring amino acid
  misc_feature (185)..(185): Xaa can be any naturally occurring amino acid
  misc_feature (252)..(252): Xaa can be any naturally occurring amino acid
  misc_feature (268)..(268): Xaa can be any naturally occurring amino acid
  misc_feature (275)..(275): Xaa can be any naturally occurring amino acid
  misc_feature (278)..(278): Xaa can be any naturally occurring amino acid
  misc_feature (280)..(280): Xaa can be any naturally occurring amino acid
  misc_feature (286)..(286): Xaa can be any naturally occurring amino acid
  misc_feature (295)..(295): Xaa can be any naturally occurring amino acid
  misc_feature (304)..(304): Xaa can be any naturally occurring amino acid
  misc_feature (309)..(309): Xaa can be any naturally occurring amino acid
  misc_feature (326)..(326): Xaa can be any naturally occurring amino acid
  misc_feature (340)..(340): Xaa can be any naturally occurring amino acid
  misc_feature (416)..(416): Xaa can be any naturally occurring amino acid
MGARASVLSGGELDRWEKIRLXPGGKKKYKLKHIVWASRXLERFAVNPGLLETSEGCXQILGQLQPSLQTGSEELKSLFNTIAVLYCVHRRINVKDTKEALEKIEEEQXESKKRAQQXEAXTKNSSQVSQNYPIVQNLQGQMVHQXIXPRTLNAWVKVIEEKAXSPEXIPMFTALSEGATPQDLXTMLNTVGGHQAAMQMLKETINEEAAEWDRLHPVHAGPIAPGQMREPRGSDIAGTTSTLQEQIGWMTXNPPIPVGEIYKRWIIXGLNKIVXMYXPXSILDIXQGPKEPFRXYVDRFYKTXRAEQXSQEVKNWMTETLLVQNXNPDCKTILKALGPXATLEEMMTACQGVGGPGHKARVLAEAMSQVTNSATILMQRGNIRNQRKTVKCFNCGKEGHIARNCRAPRKKGCWKXGREGHQMKDCTERQANFLGKIWPSHKERPGNFLQSRPEPTAPPAESFRFGEETTTPAQKQETIDKELYPLTSLKSLFGNDPSSQ

SEQ ID NO: 483 - protein, 499 aa, Human immunodeficiency virus
  misc_feature (24)..(24): Xaa can be any naturally occurring amino acid
  misc_feature (230)..(230): Xaa can be any naturally occurring amino acid
  misc_feature (316)..(316): Xaa can be any naturally occurring amino acid
  misc_feature (339)..(339): Xaa can be any naturally occurring amino acid
  misc_feature (435)..(435): Xaa can be any naturally occurring amino acid
  misc_feature (478)..(478): Xaa can be any naturally occurring amino acid
MGARASVLSGGELDRWEKIRLRPXGKKQYRLKHIVWASRELERFAVNPGLLETSDGCRKILIQLQPSLQTGSEELKSLYNTVATLYCVHQRIDVRDTKEALDKIEEEQNKSKKKAQQTAAADPGNSSQVSQNYPIVQNLQGQMVHQAISPRTLNAWVKVVEEKAFSPEVIPMFSALSEGATPQDLNTMLNTVGGHQAAMQMLKETINEEAAEWDRMHPVHAGPIAPGQMXEPRGSDIAGTTSTLQEQIGWMTSNPPIPVGEIYKRWIILGLNKIVRMYSPTSILDIKQGPKEPFRDYVDRFYKVLRAEQASQDVKXWMTETLLVQNANPDCKTILKALXPAATLEEMMTACQGVGGPGHKARVLAEAMSKVTSSNTIMIQGGNFKNQRKIKCFNCGKEGHIARNCRAPRKKGCWKCGREGHQMKDCTERQANFLXKIWPSHKGRPGNFLQNRTEPTAPPEESFMFGEETTPSQRQESXDKEMYPLTSLKSLFGNDPSSQ

SEQ ID NO: 484 - protein, 503 aa, Human immunodeficiency virus
  misc_feature (15)..(15): Xaa can be any naturally occurring amino acid
  misc_feature (25)..(25): Xaa can be any naturally occurring amino acid
  misc_feature (49)..(49): Xaa can be any naturally occurring amino acid
  misc_feature (73)..(73): Xaa can be any naturally occurring amino acid
  misc_feature (105)..(105): Xaa can be any naturally occurring amino acid
  misc_feature (450)..(450): Xaa can be any naturally occurring amino acid
MGARASILSGGELDXWEKIRLRPGXKKQYRLKHLVWASRELERFAVNPXLLETSEGCRQIIGQLQPSLQTGSXELRSLFNTVAVLYCVHQKIEVRDTKEALDKIXEEQNKSKKKAQQAAAAAANTGSSSTVSQNYPIVQNLQGAMVHQPLSPRTLNAWVKVVEEKAFSPEVIPMFSALSEGATPQDLNTMLNTVGGHQAAMQMLKETINEEAAEWDRLHPVHAGPIAPGQMREPRGSDIAGTTSTLQEQIGWMTHNPPIPVGEIYKRWIILGLNKIVRMYSPTSILDIRQGPKEPFRDYVDRFYKTLRAEQATQEVKNWMTETLLVQNANPDCKTILKALGPAATLEEMMTACQGVGGPGHKARVLAEAMSQMTNPGTIMMQRGNFRNQRKTIKCFNCGKEGHIAKNCRAPRKKGCWKCGREGHQMKDCTERQANFLGKIWPSHKGRPGXFLQSRPEPTAPPAESFRFGEETTTPPQKQEPIDKEMYPLASLRSLFGNDPSSQ

SEQ ID NO: 485 - protein, 504 aa, Human immunodeficiency virus
  misc_feature (197)..(197): Xaa can be any naturally occurring amino acid
MGARASVLSGGKLDKWEKIRLRPGGKKRYKLKHIVWASRELERFAVNPGLLETAEGCRQILGQLHPSLQTGSEELKSLYNTVAVLYCVHQNIEIKDTKEALDKIEEEQNKSKKKVQQAAAAAADTGNSSNQVSQNYPIVRNIQGQMVHQAISPRTLNAWVKVVEEKAFSPEVIPMFSALSEGATPQDLNTMLNTVGXHQAAMQMLKETINEEAAEWDRMHPVHAGPIAPGQMREPRGSDIAGTTSTLQEQIDWMTHNPPIPVGEIYKRWIILGLNKIVRMYSPTSILDIKQGPKEPFRDYVDRFYKTLRAEQATQDVKNWMTETLLVQNANPDCKTILKALGPAATLEEMMTACQGVGGPGHKARVLAEAMSQVTGSATIMMQKGNFKNQRRIVKCFNCGREGHIARNCRAPRKKGCWKCGKEGHQMKDCTERQANFLGKIWPSHKGRPGNFLQNRPEPSAPPEESFRFGEETTTPSQKQEPIDKETYPLASLKSLFGNDLLSQ

SEQ ID NO: 486 - protein, 508 aa, Human immunodeficiency virus
  misc_feature (34)..(34): Xaa can be any naturally occurring amino acid
  misc_feature (147)..(147): Xaa can be any naturally occurring amino acid
  misc_feature (237)..(237): Xaa can be any naturally occurring amino acid
  misc_feature (384)..(384): Xaa can be any naturally occurring amino acid
  misc_feature (413)..(413): Xaa can be any naturally occurring amino acid
  misc_feature (436)..(436): Xaa can be any naturally occurring amino acid
  misc_feature (460)..(460): Xaa can be any naturally occurring amino acid
MGARASILTGGELDRWEKIRLRPGGKKKYRLKHXVWASRELERFAVNPGLLETSEGCRQILEQLQPSLQTGSEELRSLYNTVAVLYCVHQKIDVKDTKEALDKIEEEQNKSKKKAQQAAAAAADTGNSSKVSQNYPIVQNMQGQMVXQPISPRTLNAWVKVVEEKAFSPEVIPMFSALSEGATPQDLNTMLNTVGGHQAAMQMLKETINEEAADWDRLHPVHAGPVAPGQMREPRGXDIAGTTSTLQEQIGWMTNNPPIPVGEIYKRWIILGLNKIVRMYSPTSILDIKQGPKEPFRDYVDRFYKVLRAEQASQEVKNWMTETLLVQNANPDCKTILKALGPAATLEEMMTACQGVGGPGHKARVLAEAMSQVTNASAAIMMQXGNFRTPGKTVKCFNCGKEGHIARNCRAPXKRGCWKCGKEGHQMKDCTERQAXFLGKIWPSHKGRPGNFHQSRLEPXAPPEESFRFKEEITPPSQKQEPIDKEIDKETYPLASLRSLFGNDPSSQ

SEQ ID NO: 487 - protein, 498 aa, Human immunodeficiency virus
  misc_feature (451)..(451): Xaa can be any naturally occurring amino acid
MGARASVLSGGKLDKWEKIRLRPGGRKKYQLKHIVWASRELERFAINPGLLETSEGCRQILGQLQPALQTGSEEFRSLYNTVATLYCVHQRIEIKDTKEALDKIEEEQNTSKKKAQQAAADTGNSSQVSQNYPIVQNLQGQMVHQAISPRTLNAWVKVVEEKAFSPEVIPMFSALSEGATPQDLNTMLNTVGGHQAAMQMLKETINEEAAEWDRVHPVHAGPIAPGQLREPRGSDIAGTTSSLQEQIAWMTHNPPIPVGDIYKRWIILGLNKIVRMYSPTSILDIRQGPKEPFRDYVDRFYKTLRAEQASQDVKNWMTETLLVQNANPDCKTILKALGPAATLEEMMTACQGVGGPGHKARVLAEAMSQVTHPAIMMQRGNFKNQRKIVKCFNCGKEGHIAKNCRAPRKKGCWKCGKEGHQMKDCTERQANFLGKIWPSHKGRPGNFPQSXLEPTAPPEESFRFGEETAPFQKQERVDRELPPLTSLKSLFGNDPSSQ

SEQ ID NO: 488 - protein, 504 aa, Human immunodeficiency virus
  misc_feature (14)..(14): Xaa can be any naturally occurring amino acid
MGARASVLSAGELXRWEKIRLRPGGKKKYRLKHIVWASRELERFAVNPGLLETSEGCKQILGQLQPSLQTGSEELKSLFNTIAVLYCVHRKIDVKDTKEALEKIEEEQNKVKEKAKQATTDTRNSSQVSQNYPIVQNMQGQMVHQAISPRTLNAWVKVIEEKAFSPEIIPMFSALSEGATPQDLNTMLNTVGGHQAAMQMLKETINEEAADWDRLHPVQAGPVAPGQMREPRGSDIAGTTSNLQEQIGWMTSNPPIPVGEIYKRWIILGLNKIVRMYSPVSILDIRQGPKEPFRDYVDRFYKTLRAEQATQEVKNWMTETLLVQNANPDCKTILKALGPAATLEEMMTACQGVGGPGHKARVLAEAMSQVTNSGAIMMQKGNFRNQRKTVKCFNCGKEGHIARNCRAPRKRGCWKCGKEGHQMKDCTERQANFLGKIWPSHKGRPGNFLQGRPESRPEPTAPPEESFRFGEETTTPPQKQETIDKELYPLASLRSLFGNDPSSQ

SEQ ID NO: 489 - protein, 497 aa, Human immunodeficiency virus
  misc_feature (109)..(109): Xaa can be any naturally occurring amino acid
  misc_feature (132)..(132): Xaa can be any naturally occurring amino acid
  misc_feature (139)..(139): Xaa can be any naturally occurring amino acid
  misc_feature (376)..(376): Xaa can be any naturally occurring amino acid
  misc_feature (379)..(379): Xaa can be any naturally occurring amino acid
  misc_feature (383)..(383): Xaa can be any naturally occurring amino acid
  misc_feature (402)..(402): Xaa can be any naturally occurring amino acid
MGARASVLSGGELDKWEKIRLRPGGKKQYKLKHIVWASRELERFAVNPGLLETSEGCRQILGQLQPSLQTGSEELRSLYNTVATLYCVHQKIDVRDTKEALDKIEEEQXKSKKKAQQAAAADTGNSKQVSQXYPIVQNXQGQMVHQPISPRTLNAWVKVVEEKAFSPEVIPMFSALSEGATPQDLNTMLNTVGGHQAAMQMLKETINEEAAEWDRLHPVHAGPIAPGQMREPRGSDIAGTTSTLQEQIAWMTNNPPIPVGEIYKRWIILGLNKIVRMYSPTSILDIRQGPKEPFRDYVDRFYKTLRAEQASQDVKNWMTETLLVQNANPDCKTILKALGPGATLEEMMTACQGVGGPGHKARVLAEAMSQVTNSNXIMXQRGXFRNQRKIIKCFNCGKEGHXARNCRAPRKKGCWKCGKEGHQMKDCTERQANFLGKVWPSHKGRPGNFLQNRPEPSAPPAESFRFGEETTPPQKQEQTDKEPYPLTSLKSLFGSDP

SEQ ID NO: 490 - protein, 486 aa, Human immunodeficiency virus
  misc_feature (122)..(122): Xaa can be any naturally occurring amino acid
MGARASVLSAGELDRWEKIRLRPGGKKKYRLKHIIWASRELERFAVNPGLLETATGCRQILGQLQPSLQTGSEELRSLYNTIATLYCVHQKIEVKDTKEALDKIEEEQNKSKRAAQQAATGXGNSSQVSQNYPIVQNLQGQMVHQPIAPRTLNAWVKVIEEKAFSPEVIPMFTALSEGATPQDLNTMLNTVGGHQAAMQMLKETINEEAAEWDRLHPPQAGPLPPGQIREPRGSDIAGTTSNLQEQITWMTGNPPIPVGEIYKRWIVMGLNKIVRMYSPTSILDIRQGPKEPFRDYVDRFYKTLRAEQASQEVKNWMTETLLVQNANPDCKTILKALGPGASLEEMMTACQGVGGPSHKARVLAEAMSQVANPATVMMQRGNYKNQRKTVKCFNCGKEGHIAKNCRAPRKKGCWKCGREGHQMKDCTERQANFLGNFLQNRPEPTAPPEESFSFGGEITTPPQKQELTDKELYPSASLKSLFGNDH

SEQ ID NO: 491 - protein, 501 aa, Human immunodeficiency virus
  misc_feature (349)..(349): Xaa can be any naturally occurring amino acid
  misc_feature (417)..(417): Xaa can be any naturally occurring amino acid
  misc_feature (486)..(486): Xaa can be any naturally occurring amino acid
MGARASVLSGGQLDKWEKIRLRPGGKKKYQLKHIVWASRELERFAVNPGLLETSGGCKQILGQLHPSLQTGSEELKSLYNTVAVLYCVLQGIEVKDTKEALDKIEEEQNKSKKAQQAAADAGNSSQVSQNYPIVQNLQGQMVHQAISPRTLNAWVKVVEEKAFSPEVIPMFSALSEGATPQDLNTMLNTVGGHQAAMQMLKETINEEAAEWDRLHPVHAGPVAPGQMREPRGSDIAGTTSTLQEQIGWMTNNPPIPVGEIYKRWIIMGLNKIVRMYSPTSILDIKQGPKEPFRDYVDRFYKTLRAEQASQEVKGWMTETLLVQNANPDCKTILKALGPGATLEEMMTAXQGVGGPSHKARILAEAMSQVTNQNAIMMQRGNFKNQRKTVKCFNCGKEGHIARNCRAPRKRGCWKCGXEGHQMKDCTERQANFLGKIWPSHKGRPGNFLQNRPEPTAPPMESFREETTAPSQKQETIDRDRDKELYXLASLRSLFGNDPSSQ

SEQ ID NO: 492 - protein, 501 aa, Human immunodeficiency virus
  misc_feature (30)..(30): Xaa can be any naturally occurring amino acid
  misc_feature (276)..(276): Xaa can be any naturally occurring amino acid
  misc_feature (376)..(376): Xaa can be any naturally occurring amino acid
  misc_feature (403)..(403): Xaa can be any naturally occurring amino acid
  misc_feature (486)..(486): Xaa can be any naturally occurring amino acid
  misc_feature (488)..(488): Xaa can be any naturally occurring amino acid
MGARASVLSGGKLDRWEKIRLRPGGKKKYXLKHLVWASRELERFAVNPGLLETSGGCRQILEQLQPSLKTGSEELKSLFNTVATLYCVHQGIDIKDTKEALDKIEEEQNESKKKAQQAAADTGNSSGQVSQNYPIVQNLQGQMVHQAISPRTLNAWVKVIEEKAFSPEVIPMFSALSEGATPQDLNTMLNTVGGHQAAMQMLKETINEEAAEWDRLHPVHAGPIAPGQMREPRGSDIAGTTSNLQEQIGWMTNNPPIPVGEIYKRWIILGLNKIVXMYSPTSILDIKQGPKEPFRDYVDRFYKTLRAEQASQEVKNWMTETLLVQNANPDCKTILKALGPGATLEEMMTACQGVGGPSHKARVLAEAMSHMTNPAXIMMQRGNFRNQRKIVKCFNCGKEGHIXKNCRAPRKKGCWKCGKEGHQMKDCAERQANFLGKIWSSHKGRPGNFLQSRPEPTAPPEESFRFGEETTTPSQKQGPIYKELYXLXSLRSLFGNDPSSQ

SEQ ID NO: 493 - protein, 501 aa, Human immunodeficiency virus
  misc_feature (303)..(303): Xaa can be any naturally occurring amino acid
  misc_feature (374)..(374): Xaa can be any naturally occurring amino acid
  misc_feature (501)..(501): Xaa can be any naturally occurring amino acid
MGARASVLSAGELDKWEKIRLRPGGKKKYRLKHIVWASRELERFAVNPGLLETSEGCRQILGQLQPSLQTGSEELRSLYNTVATLYCVHQKIEVKDTKEAVDKVEEEQNKSKKKAQQAAAGTGNSSQVSQNYPIVQNLQGQMVHQAISPRTLNAWVKVVEEKAFSPEVIPMFSALSEGATPQDLNTMLNTVGGHQAAMQMLKETINEEAAEWDRLHPVHAGPIAPGQMREPRGSDIAGTTSTLQEQIGWMTNNPPIPVGEIYKRWIILGLNKIVRMYSPTSILDIRQGPKEPFRDYVDRFYKXLRAEQASQEVKNWMTETLLVQNANPDCKTILKALGPAATLEEMMTACQGVGGPGHKARVLAEAMSQVTSSXIMMMQKGNFRNQKRAIKCFNCGKEGHIAKNCRAPRRKGCWKCGKEGHQMKDCTNERQANFLGKIWPSHKGRPGNFLQSRPEPSAPPEESFRFGEEATAPSQKQEQTDKELYPLASLKSLFGNDPLSX

SEQ ID NO: 494 - protein, 500 aa, Human immunodeficiency virus
  misc_feature (40)..(40): Xaa can be any naturally occurring amino acid
  misc_feature (78)..(78): Xaa can be any naturally occurring amino acid
  misc_feature (82)..(82): Xaa can be any naturally occurring amino acid
  misc_feature (116)..(116): Xaa can be any naturally occurring amino acid
  misc_feature (162)..(162): Xaa can be any naturally occurring amino acid
  misc_feature (175)..(175): Xaa can be any naturally occurring amino acid
  misc_feature (315)..(315): Xaa can be any naturally occurring amino acid
  misc_feature (443)..(443): Xaa can be any naturally occurring amino acid
  misc_feature (462)..(462): Xaa can be any naturally occurring amino acid
MGARASVLSGGKLDRWEKIRLRPGGKKKYKLKHLVWASRXLERFAVNPGLLETSEGCRQILSQLQPSLQTGSEELKSXFNTXATLYCVHQNIEVKDTKEALDKIEEEQNKSKKKAXQAAADTGNSNQVSQNYPIVQNLQGQMVHQPIAPRTLNAWVKVVEEXAFSPEVIPMFAAXSEGATPQDLNTMLNTVGGHQAAMQMLKETINEEAAEWDRLHPVQAGPIAPGQMREPRGSDIAGTTSTLQEQIAWMTNNPAIPVGEIYKKWIIIGLNKIVRMYSPTSILDIRQGPKEPFRDYVDRFYKTLRAEQASQDVKXWMTETLLVQNANPDCKTILKALGPGATLEEMMTACQGVGGPSHKARVLAEAMSHVSNPTTIMMQKGNFKNQRKTVKCFNCGKEGHIARNCRAPRKKGCWKCGREGHQMKDCTERQANFLGKIWPSRRXRPGNFLQNRLEPTAPPEEXLRFGEETTAPSQKQEKADKELYPLASLRSLFGNDPSSQ

SEQ ID NO: 495 - protein, 498 aa, Human immunodeficiency virus
  misc_feature (458)..(458): Xaa can be any naturally occurring amino acid
MGARASILSGGGLDRWEKIRLRPGGRKKYKLKHLVWASRELERFAINPGLLETSEGCRQILGQLQSSLQTGSEELKSLYNTIATLYCVHQKIDVKDTKEALDKIEEEQNKKKAQQAAADTGSNKQVSQNYPIVQNIQGQMVHQPLSPRTLNAWVKVVEEKAFSPEVIPMFSALSEGATPQDLNTMLNTVGGHQAAMQMLKETINEEAAEWDRLHPVQAGPVAPGQMREPRGSDIAGTTSTLQEQIGWMTNNPPIPVGEIYKRWIILGLNKIVRMYSPTSILDIRQGPKEPFRDYVDRFYKTLRAEQASQEVKNWMTETLLVQNANPDCKTILKALGPAATLEEMMTACQGVGGPGHKARVLAEAMSQVTNSNAVMMQRGNFRNQRKVIKCFNCGREGHIAKHCRAPRKKGCWKCGKEGHQMKDCTERQANFLGKIWPSSKGRPGNFLQSRPEPTAPPXESFSFREEKTTPPQKQEQIDKELYPLSSLRSLFGNDPSSQ

SEQ ID NO: 496 - protein, 502 aa, Human immunodeficiency virus
MGARASVLSGGELDRWKKIRLRPGGKKKYKLKHIVWASRELERFAVNPGLLETSGGCKQILAQLQPSLQTGSEELKSLFNTVAVLYCVHQKIEVKDTKEALDKIEEEQNKSMKKAQQTAAGTGNSSQVSQNYPIVQNLQGQMVHQALSPRTLNAWVKVVEEKAFSPEVIPMFSALSEGATPQDLNTMLNTVGGHQAAMQMLKETINEEAAEWDRLHPVHAGPIAPGQMREPRGSDIAGTTSTLQEQIAWMTNNPPIPVGEIYKRWIILGLNKIVRMYSPTSILDIRQGPKEPFRDYVDRFYKTLRAEQATQEVKNWMTETLLVQNSNPDCKTILKALGPGATLEEMMTACQGVGGPGHKARVLAEAMSQATNSANIIMMQRGNFRNQRKIIKCFNCGREGHIAKNCRAPRKKGCWKCGKEGHQMKDCTERQANFLGKIWPSNKGRPGNFLQSRPEPTAPPEESFRFGEETTASPQKQEPINKELYPPLASLRSLFGNDPSSQ

SEQ ID NO: 497 - protein, 501 aa, Human immunodeficiency virus
  misc_feature (14)..(14): Xaa can be any naturally occurring amino acid
  misc_feature (26)..(26): Xaa can be any naturally occurring amino acid
  misc_feature (385)..(385): Xaa can be any naturally occurring amino acid
MGARASVLSGGQLXKWEKIRLRPGGXKRYRLKHLVWASRELERFAVNPGLLETSEGCRQILGQLQPSLETGSEELRSLYNTVATLYCVHQGIGIKDTKEALEKVEEEQNKSKKKAQQVAAAAGAGNSSQVSQNYPIVQNLQGQMVHQALSPRTLNAWVKVVEEKAFSPEVIPMFSALSEGATPQDLNTMLNTVGGHQAAMQMLKETINEEAAEWDRLHPVHAGPIAPGQMREPRGSDIAGTTSNLQEQIGWMTNNPPIPVGEIYKRWIILGLNKIVRMYSPTSILDIRQGPKEPFRDYVDRFYKTLRAEQASQEVKNWMTETLLVQNANPDCKTILKALGPAATLEEMMTACQGVGGPSHKARVLAEAMSQANSTTIMMQKGNFXNQRKMVKCFNCGKEGHIARNCRAPRKKGCWKCGKEGHQMKDCTERQANFLGKIWPSHKGRPGNFLQSRPEPTAPPEESFRFGGETTTPSQKQEPIDKELYPLASLKSLFGNDPSSQ

SEQ ID NO: 498 - protein, 506 aa, Human immunodeficiency virus
MGARASVLSGGELDRWEKIRLRPGGKKRYKLKHIVWASRELERFALNPGLLETAGGCRQIIAQLHPSLQTGSEELKSLFNTVATLYCVHQRIDVKDTKEALEKIEEEQNKSKKKAQQAAADTGNSSQENSSQISQNYPIIQNLQGQMVHQAISPRTLNAWVKVVEEKAFSPEVIPMFSALSEGATPQDLNTMLNTVGGHQAAMQMLKETINEEAAEWDRLHPVHAGPAAPGQMREPRGSDIAGSTSTLQEQIGWMTSNPPIPVGEIYKRWIILGLNKIVRMYSPTSILDIKQGPKEPFRDYVDRFYKTLRAEQASQDVKNWMTETLLVQNANPDCKTILKALGPAATLEEMMTACQGVGGPSHKAKVLAEAMSQTTSSAAIMMQKGNLRNPKKPVKCFNCGKEGHIAKNCRAPRKKGCWKCGREGHQMKDCTERQANFLGKIWPSHKGRPGNFFQSGLEPTAPPEESFRFGEATATPPQKQEPIDKEPLYPLTSLKSLFGNDPSSQ

SEQ ID NO: 499 - protein, 503 aa, Human immunodeficiency virus
  misc_feature (82)..(82): Xaa can be any naturally occurring amino acid
MGARASVLSGGELDKWERIRLRPGGRKKYRLKHIVWASRELERFAVNPGLLETSEGCRQILGQLQPALQTGSEELRSLYNTXATLYCVHQKIEVKDTKEALEKIEEEQNKSKKKAQAQQAAAGAGNNSPASQNYPIVQNIQGQMVHQPISPRTLNAWVKVVEEKAFSPEVIPMFSALAEGATPQDLNTMLNTVGGHQAAMQMLKETINEEAAEWDRLHPVQAGPVAPGQMREPRGSDIAGTTSTLQEQIGWMTGNPPIPVGEIYKRWIILGLNKIVRMYSPTSILDIKQGPKEPFRDYVDRFYKTLRAEQASQEVKNWMTETLLVQNANPDCKTILKALGPAATLEEMMTACQGVGGPGHKARVLAEAMSQATSSAAAIMMQRGNFRNQRKSIKCFNCGREGHLARNCKAPRKKGCWKCGKEGHQMKDCTERQANFLGKIWPSHKGRPGNFLQNRPEPTAPPEESFKFGEETATPPQKQEPIDKELYPLTSLRSLFGSDPSSQ

SEQ ID NO: 500 - protein, 502 aa, Human immunodeficiency virus
MGARASILSSGQLDRWEKIRLRPGGKKKYRLKHIVWASRELERFAVNPGLLETSEGCRKILEQLQPSLQTGSEELKSLYNTVATLYCVHLKIDIKDTKEALDKIEEEQNKSKKKAQQAAAAADTGNSNQVSQNYPIVQNLQGQMVHQNMSPRTLNAWVKVIEEKAFSPEVIPMFSALSEGATPQDLNTMLNTVGGHQAAMQMLKETINEEAAEWDRLHPVQAGPVAPGQIREPRGSDIAGTTSTLQEQIAWMTHNPPIPVGEIYKRWIILGLNKIVRMYSPVSILDIRQGPKEPFRDYVDRFYKTLRAEQASQDVKNWMTETLLVQNANPDCKTILKALGPAASLEEMMTACQGVGGPGHKARVLAEAMSQVTTPSAIMMQRGNFRNQRKSVKCFNCGKEGHIAKNCRAPRKRGCWKCGKEGHQMKDCTERQANFLGKIWPSHKGRPGNFLQSRPEPSAPPEESFRFGEETTTPSQKQEPIDKEIYPLASLKSLFGNDPSSQ

SEQ ID NO: 501 - protein, 500 aa, Human immunodeficiency virus
MGARASVLSGGELDRWEKIRLRPGSKKRYKLKHIVWASRELERFAVNPGLLETSGGCKQILAQLHPSLQTGSEELKSLYNTVATLYCVHQKIDVKDTKEALDKIEEEQNKSKKKAQQTAIDAGSSSQASQNYPIVQNLQGQMVHQALSPRTLNAWVKVIEEKAFSPEVIPMFTALSEGATPQDLNTMLNTVGGHQAAMQMLKETINEEAAEWDRLHPVHAGPVAPGQMREPRGSDIAGTTSTLQEQIAWITNNPPIPVGEIYKRWIILGLNKIVRMYSPVSILDIKQGPKEPFRDYVDRFYKTLRAEQATQEVKNWMTETLLVQNANPDCKTILKALGPAATLEEMMTACQGVGGPGHKARVLAEAMSQVTTSANIMMQRGNFKNQRKIVKCFNCGKEGHIAKNCRAPRKRGCWKCGQEGHQMKDCTERQANFLGKVWPSHKGRPGNFLQSRPEPTAPPAESFRFGEETTTPSQKQEPINKEQYPLASLRSLFGNDPSSQ

SEQ ID NO: 502 - protein, 501 aa, Human immunodeficiency virus
MGARASVLSGGELDRWEKIRLRPGGKKKYRLKHVVWASRELERFAVNPSLLETSEGCRQILVQLQPSLQTGSEEIKSLYNTVATLYCVHQRIDVKDTKEALEKIEEEQNKSNKKAQQAAADTGNSSSHVSQNYPIVQNMQGQMVHQAISPRTLNAWVKVVEEKAFSPEVIPMFSALSEGATPQDLNTMLNTVGGHQAAMQMLKETINEEAAEWDRLHPVHAGPIAPGQMREPRGSDIAGTTSTLQEQIGWMTNNPPIPVGEIYKRWIILGLNKIVRMYSPTSILDIRQGPKEPFRDYVDRFYKTLRAEQASQEVKNWMTETLLVQNANPDCKTILKALGPGATLEEMMTACQGVGGPGHKARVLAEAMSQVTNPANIMMQRGNFRNPRKTVKCFNCGKEGHIAKNCRAPRKKGCWKCGKEGHQMKDCPERQANFLGKIWPSYKGRPGNFLQSRPEPSAPPEESFRFGEETTTPSQKQEQIDKELYPLASLRSLFGNDPSSQ

SEQ ID NO: 503 - protein, 504 aa, Human immunodeficiency virus
MGARASILSGGQLDRWEKIRLRPGGKKKYKLKHIVWASRELERFAVNPGLLETAEGCRQILGQLQPSLQTGSEEIKSLYNMIATLYCVHQRIEVKDTKEALEKIEEEQNKSKKKAQQAAADAGENSKVSQNYPIVQNLQGQMVHQALSPRTLNAWVKVIEEKAFSPEVIPMFTALSEGATPQDLNTMLNTVGGHQAAMQILKETINEEAADWDRLHPVHAGPIAPGQMREPRGSDIAGTTSTLQEQIGWMTSNPPIPVGEIYKRWIILGLNKIVRMYSPVSILDIKQGPKEPFRDYVDRFYKTLRAEQASQDVKNWMTETLLVQNANPDCKTILKALGPAATLEEMMTACQGVGGPGHKARVLAEAMSQMTNSATIMMQRGNFKKQRKIVKCFNCGKEGHIAKNCRAPRKRGCWKCGKEGHQMKDCTERQANFLGKIWPSHKGRPGNFLQNRPEPVEPTAPPEESFRFGEEATTPPPQKQDTKDKELYPLASLRSLFGNDPSSQ

SEQ ID NO: 504 - protein, 500 aa, Human immunodeficiency virus
  misc_feature (303)..(303): Xaa can be any naturally occurring amino acid
MGARASVLSGGELDKWEKIRLRPGGKKQYRLKHIVWASRELERFAVNPGLLETSEGCRQILGQLQPSLQTGSEELRSLYNTIAVLYCVHQRIEVRDTKEALDKIEEEQNKSKKKAQPAAADTGSNSQVSQNYPIVQNMQGQMVHQAISPRTLNAWVKVVEEKAFSPEVIPMFAALSEGATPQDLNTMLNTVGGHQAAMQMLKETINEEAAEWDRMHPVHAGPIAPGQMREPRGSDIAGTTSTLQEQIGWMTHNPPIPVGEIYKKWIIMGLNKIVRMYSPTSILDIKQGPKESFRDYVDRFYKXLRAEQASQEVKNWMTETLLVQNANPDCKTILKALGPAATLEEMMTACQGVGGPGHKARVLAEAMSQVTNSATVMMQRGNYRNQRKPVKCFNCGKEGHIAKNCRAPRKKGCWKCGKEGHQMKDCTERQANFLGKIWPSHKGRPGNFLQSRPEPTAPPEESFRFGEETPIPSQKQEPTDKETYPLTSLRSLFGNDPSSQ

SEQ ID NO: 505 - protein, 492 aa, Human immunodeficiency virus
  misc_feature (15)..(15): Xaa can be any naturally occurring amino acid
  misc_feature (226)..(226): Xaa can be any naturally occurring amino acid
MGARASVLSGGQLDXWEKIRLRPGGKKKYKLKHIVWASRELERFAVNPGLLETAEGCRQILGQLQPALQTGSEELRSLFNTVATLYCVHQKIEVKDTKEALEKVEEEQNKSKKKAQQAAADTGNSSQVSQNYPIVQNLQGQMVHQALSPRTLNAWVKVIEEKAFSPEVIPMFTALSEGATPQDLNTMLNTVGGHQAAMQMLKETINEEAAEWDRTHPVHAGPIAPXQMREPRGSDIAGTTSNLQEQIAWMTNNPPIPVGEIYKRWIILGLNKIVRMYSPTSILDIRQGPKEPFRDYVDRFYKTLRAEQASQDVKNWMTETLLVQNANPDCKTILKALGPAATLEEMMTACQGVGGPGHKARVLAEAMSQVSNSATIMMQRGNFRNQRKTIKCFNCGKEGHLARNCRAPRKKGCWKCGKEGHQMKDCTERQANFLGKIWPSHKGRPGNFLQSRPEPTAPPEESFRFGEETTTDKELYPLASLKSLFGNDPSSQ

SEQ ID NO: 506 - protein, 503 aa, Human immunodeficiency virus
  misc_feature (92)..(92): Xaa can be any naturally occurring amino acid
  misc_feature (101)..(101): Xaa can be any naturally occurring amino acid
  misc_feature (146)..(146): Xaa can be any naturally occurring amino acid
  misc_feature (244)..(244): Xaa can be any naturally occurring amino acid
  misc_feature (343)..(343): Xaa can be any naturally occurring amino acid
  misc_feature (463)..(463): Xaa can be any naturally occurring amino acid
MGARASVLSGGKLDRWEKIRLRPGGKKKYKLKHIVWASRELERFAVNPGLLETSEGCRQILGQLQPSLQTGSEELRSLYNTVATLYCVHQNXEVRDTKEAXEKIEEEQNKSKKKAQQAAAAAGAGNSSQAASQNYPIVQNMQGQMXHQAISPRTLNAWVKVIEEKAFSPEVIPMFSALSEGATPQDLNTMLNTVGGHQAAMQMLKETINEEAAEWDRLHPVHAGPIAPGQMREPRGSDIAGTTXTLQEQIGWMTNNPPIPVGEIYKRWIILGLNKIVRMYSPISILDIRQGPKEPFRDYVDRFYKTLRAEQASQEVKNWMTETLLVQNANPDCKTILKALGPXATLEEMMTACQGVGGPGHKARVLAEAMSQVTTSNTIMMQRGNFRNQRKAVKCFNCGKEGHIAKNCRAPRKKGCWKCGKEGHQMKDCTERQANFLGKIWPSHKGRPGNFLQSRPEPTAPPXESFRFGEEATTPPQKPEPIDKELYPLASLRSLFGNDPSSQ

SEQ ID NO: 507 - protein, 499 aa, Human immunodeficiency virus
  misc_feature (200)..(200): Xaa can be any naturally occurring amino acid
  misc_feature (392)..(392): Xaa can be any naturally occurring amino acid
MGARASILSGGALDRWEKIRLRPGGKKKYRLKHLVWASRELERFAVNPGLLETSGGCRQILEQLQPSLQTGSEEIKSLYNTVAVLYCVHLRIDVKDTKEALDKIEEEQNKSKKKAQVTAADTGNSSKVSQNYPIVQNLQGQMVHQPISPRTLNAWVKVVEEKAFSPEVIPMFSALSEGATPQDLNTMLNTVGGHQAAMQXLKETINEEAAEWDRLHPVHAGPIAPGQMREPRGSDIAGTTSTLQEQIGWMTNNPPIPVGEIYKRWIILGLNKIVRMYSPTSILDIRQGPKEPFRDYVDRFYKTLRAEQASQEVKNWMTETLLVQNANPDCKTILKALGPAATLEEMMTACQGVGGPGHKARVLAEAMSQVTNSATIMMQRGNFRNQRKIVKXFNCGKEGHIAKNCRAPRKKGCWKCGKEGHQMKDCIERQANFLGKIWPSNKGRPGNFLQSRPEPTAPPEESFRFGKETTTPSQKQESKEELYPLTSLRSLFGNDPSSQ

SEQ ID NO: 508 - protein, 500 aa, Human immunodeficiency virus
  misc_feature (17)..(17): Xaa can be any naturally occurring amino acid
  misc_feature (20)..(20): Xaa can be any naturally occurring amino acid
  misc_feature (23)..(23): Xaa can be any naturally occurring amino acid
  misc_feature (30)..(30): Xaa can be any naturally occurring amino acid
  misc_feature (49)..(49): Xaa can be any naturally occurring amino acid
  misc_feature (51)..(51): Xaa can be any naturally occurring amino acid
  misc_feature (57)..(57): Xaa can be any naturally occurring amino acid
  misc_feature (154)..(154): Xaa can be any naturally occurring amino acid
  misc_feature (403)..(403): Xaa can be any naturally occurring amino acid
MGARASVLSGGELDKWXKIXLRXGGKKKYXLKHIVWASRELERFAVNPXLXETSEGXRQILGQLQPSLQTGSEELKSLFNTVAVLYCVHQRIDVKDTKEALEKIEEEQNKSQKKAQQAAADTRNSSQVSQNYPIVQNIQGQMVHQAISPRTLNXWVKVVEEKAFSPEVIPMFSALSEGATPQDLNTMLNTVGGHQAAMQMLKETINEEAAEWDRLHPVQAGPVAPGQMREPRGSDIAGTTSTLQEQIGWMTSNPPIPVGEIYKRWIIMGLNKIVRMYSPTSILDIRQGPKEPFRDYVDRFYKTLRAEQASQEVKNWMTETLLVQNANPDCKTILKALGPAATLEEMMTACQGVGGPGHKARVLAEAMSQVTNSATIMMQRGNFKGQRKIVKCFNCGKEGHIAXNCRAPRKKGCWRCGKEGHQMKDCTERQANFLGKIWPSHKERPGNFLQSRPEPTAPPEESFRFGEETTTPSQKQESIDKDLYPLASLRSLFGNDHSSQ

SEQ ID NO: 509 - protein, 500 aa, Human immunodeficiency virus
  misc_feature (17)..(17): Xaa can be any naturally occurring amino acid
  misc_feature (28)..(28): Xaa can be any naturally occurring amino acid
  misc_feature (37)..(37): Xaa can be any naturally occurring amino acid
  misc_feature (99)..(99): Xaa can be any naturally occurring amino acid
  misc_feature (118)..(118): Xaa can be any naturally occurring amino acid
  misc_feature (162)..(162): Xaa can be any naturally occurring amino acid
  misc_feature (187)..(187): Xaa can be any naturally occurring amino acid
  misc_feature (312)..(312): Xaa can be any naturally occurring amino acid
  misc_feature (362)..(362): Xaa can be any naturally occurring amino acid
  misc_feature (400)..(400): Xaa can be any naturally occurring amino acid
  misc_feature (419)..(419): Xaa can be any naturally occurring amino acid
MGARASILSGGELDRWXKIRLRPGGKKXYRLKHLVWXSRELERFAVNPGLLETSTGCRQILQQLQPALQTGSEELKSVYNTVATLYCVHQRIDVKDTKXALEKIEEEQNKSKKKEQQXAAGTGNSSQVSQNYPIVQNLQGQMVHQAISPRTLNAWVKVVEEXAFSPEVIPMFSALSEGATPQDLNTXLNTVGGHQAAMQMLKETINEEAAEWDRLHPVHAGPIAPGQMREPRGSDIAGTTSTLQEQIGWMTNNPPIPVGEIYKRWIILGLNKIVRMYSPTSILDIRQGPKEPFRDYVDRFYKTLRAEQASQXVKNWMTETLLVQNANPDCKTILKALGPAATLEEMMTACQGVGGPGHKARXLAEAMSQVTSPATVMIQRGNFRNQRKAVKCFNCGKEGXIAKNCRAPRKKGCWKCGKXGHQMKDCTERQANFLGKIWPSHKGRPGNFLQSRPEPSAPPEESFRFGEETTTPSQKQETIDRDLYPLASLKSLFGNDPSSQ

SEQ ID NO: 510 - protein, 501 aa, Human immunodeficiency virus
  misc_feature (10)..(10): Xaa can be any naturally occurring amino acid
  misc_feature (48)..(48): Xaa can be any naturally occurring amino acid
  misc_feature (84)..(84): Xaa can be any naturally occurring amino acid
  misc_feature (113)..(113): Xaa can be any naturally occurring amino acid
  misc_feature (127)..(127): Xaa can be any naturally occurring amino acid
  misc_feature (135)..(135): Xaa can be any naturally occurring amino acid
  misc_feature (201)..(201): Xaa can be any naturally occurring amino acid
  misc_feature (203)..(203): Xaa can be any naturally occurring amino acid
  misc_feature (215)..(215): Xaa can be any naturally occurring amino acid
  misc_feature (240)..(240): Xaa can be any naturally occurring amino acid
  misc_feature (290)..(290): Xaa can be any naturally occurring amino acid
  misc_feature (292)..(292): Xaa can be any naturally occurring amino acid
  misc_feature (309)..(309): Xaa can be any naturally occurring amino acid
  misc_feature (344)..(344): Xaa can be any naturally occurring amino acid
  misc_feature (362)..(362): Xaa can be any naturally occurring amino acid
  misc_feature (394)..(394): Xaa can be any naturally occurring amino acid
  misc_feature (425)..(425): Xaa can be any naturally occurring amino acid
MGARASVLSXGELDKWEKIRLRPGGKKQYKLKHIVWASRELERYALNXGLLETTEGCRQILGQLQPSLQTASEELRSLYNTVAXLYCVHQRIEIRDTKEALDRIEEEQNKSKXKAQQAAADTGNSSXVSQNYPIXQNMQGQMVHQPLSPRTLNAWVKVIEEKAFSPEVIPMFSALSEGATPQDLNTMLNTVGGHQAAMQMXKXTINEEAAEWDRXHPVQAGPVAPGQIREPRGSDIAGTXSTLQEQIAWMTHNPPIPVGEIYKRWIILGLNKIVRMYSPTSILDIRQGPXEXFRDYVDRFYKTLRAEQXSQEVKNWMTETLLVQNANPDCKTILKALGPGATLXEMMTACQGVGGPSHKARXLAEAMSQVTNPTTIMMQRGNFRNQRKSVKCFXCGKEGHTARNCRAPRKKGCWKCGKEGHQMKXCTERQANFLGKIWPSHKGGRPGNFLQSRPEPTAPPEESFRFGEETTAPLQKQEKGDGELYPLTSLKSLFGNDPSSQ

SEQ ID NO: 511 - protein, 505 aa, Human immunodeficiency virus
  misc_feature (385)..(385): Xaa can be any naturally occurring amino acid
  misc_feature (393)..(393): Xaa can be any naturally occurring amino acid
  misc_feature (452)..(452): Xaa can be any naturally occurring amino acid
MGARASVLSGGELDRWERIRLRPGGSKKYKLKHIIWASRELERFAVNPGLLETSEGCKQILIQIQPSLQTGSEELRSLYNTVATLYCVHQKIDVKDTKEALEKVEEEQNKSKKKAQQAADNTGSNNTGSNNQVSQNYPIVQNMQGQMVHQPISPRTLNAWVKVIEEKAFSPEVIPMFTALSEGATPQDLNTMLNTVGGHQAAMQMLKETINEEAAEWDRLHPVHAGPPVAGQMREPRGSDIAGTTSTLQEQIGWMTSNPPIPVGEIYKRWIILGLNKIVRMYSPTSILDIKQGPKEPFRDYVDRFYKTLRAEQASQDVKNWMTETLLVQNANPDCKTILKALGPAATLEEMMTACQGVGGPGHKARVLAEAMSQLTGSATVMMQXGNFRNQRXSVKCFNCGKEGHIARNCRAPRKRGCWKCGKEGHQMKDCIEGQANFLGKIWPSHKGRPGXFLQSRPEPTAPPAPPEESFRFGEETTKQEKRDQELYPPLTSLRSLFGNDPLSQ

SEQ ID NO: 512 - protein, 505 aa, Human immunodeficiency virus
  misc_feature (487)..(487): Xaa can be any naturally occurring amino acid
MGARASILSGGQLDRWEKIRLRPGGKKQYKLKHIVWASRELERFAVNPGLLETSEGCRQILGQLQPSLQTGSEELKSLFNTVAVLYCVHQRIEVKDTKEALDKIEEEQNKSKKKAQQAAAADTGNANQVSQNYPIVQNLQGQMVHQAISPRTLNAWVKVVEEKAFSPEVIPMFTALSEGATPQDLNTMLNTVGGHQAAMQMLKETINEEAAEWDRLHPVHAGPIAPGQMREPRGSDIAGTTSTLQEQIGWMTHNPPIPVGDIYKRWIIMGLNKIVRMYSPTSILDIRQGPKEPFRDYVDRFYKTLRAEQASQEVKNWMTETLLVQNSNPDCRTILKALGPAATLEEMMTACQGVGGPGHKARVLAEAMSQVTSPAAVMMQRGNFRNQRKSVKCFNCGKEGHIARNCRAPRKKGCWKCGKEGHQMKDCTERQANFLGKIWPSHKGGRPGNFLQSRPEPTAPPAPPEESFRFGEEITTPSQKQETKDKXMYPLTSLRSLFGNDPSSQ

SEQ ID NO: 513 - protein, 504 aa, Human immunodeficiency virus
  misc_feature (384)..(384): Xaa can be any naturally occurring amino acid
  misc_feature (483)..(483): Xaa can be any naturally occurring amino acid
  misc_feature (501)..(501): Xaa can be any naturally occurring amino acid
MGARASVLSGGELDRWEKIRLRPMGKKKYRLKHIVWASRELERFAVNPGLLETSGGCRQILEQLQPSLQTGSEELRSLYNTIAVLYCVHQRIEVKDTKEALDKIEEEQNKSKKKTQQAAADAGKSSQVSQNYPIVQNLQGQMVHQAISPRTLNAWVKVVEEKAFSPEVIPMFSALAEGATPQDLNTMLNTVGGHQAAMQMLKETINEEAAEWDRLHPVHAGPIAPGQMREPRGSDIAGTTSTLQEQIGWMTNNPPIPVGEIYKRWIIMGLNKIVRMYSPTSILDIRQGPKEPFRDYVDRFYKTLRAEQASQEVKNWMTETLLVQNANPDCKTILKALGPAATLEEMMTACQGVGGPGHKARVLAEAMSQVTNPATIMMQRGNFXNQRKPIKCFNCGKDGHIASKCRAPRKKGCWKCGQEGHQMRDCPGRQANFLGKILPSYKGRPGNFLQSRPEPSAPPEESFRFGEETTTPPQNPPQKQESXDKELYPLASLKSLFGNDXLSQ

SEQ ID NO: 514 - protein, 502 aa, Human immunodeficiency virus
MGARASVLRGGELDRWEKIRLRPGGKKKYKLKHLVWASRELERFAVNPGLLETSEGCKQILGQFQSSLQTGSEEFRSLYNTVATLYCVHQKIDVKDTKEALDKIEEEQNKSKKRAQQAAADTGNSNQVSQNSNQASQNYPIVQNLQGQMVHQALSPRTLNAWVKVVEEKAFSPEVIPMFSALSEGATPTDLNTMLNTVGGHQAAMQMLKETINEEAAEWDRLHPVHAGPIAPGQMREPRGSDIAGTTSTLQEQIGWMTNNPPIPVGDIYKRWIIMGLNKIVRMYSPTSILDIRQGPKEPFRDYVDRFYKTLRAEQASQEVKNWMTETLLVQNANPDCKTILKALGPAATLEEMMTACQGVGGPGHKARVLAEAMSQVTNSTAIMMQRGNLRNQRKTIKCFNCGKEGHLARNCRAPRKKGCWKCGKEGHQMKDCTERQANFLGKIWPSNKGRPGNFLQSRPEPSAPPEESFREEMATPSQKQETRDKELYPLASLKSLFGNDP

SEQ ID NO: 515 - protein, 501 aa, Human immunodeficiency virus
  misc_feature (39)..(39): Xaa can be any naturally occurring amino acid
  misc_feature (175)..(175): Xaa can be any naturally occurring amino acid
MGARASVLSGGKLDKWEKIRLRPGGKKHYQLKHIVWASXELERFALNPGLLETSEGCKQILGQLQPALQTGSEEFKSLYNTVATLYCVHQRIDVKDTQEALEKIEEEQNKSKKKAQQAAAADTGKSSQVSQNYPIVQNLQGQMVHQAISPRTLNAWVKVVEEKAFSPEVIPMFSXLSEGATPQDLNTMLNTVGGHQAAMQMLKETINEEAAEWDRVHPVHAGPVAPGQMREPRGSDIAGTTSTLQEQIGWMTNNPPIPVGEIYKRWIILGLNKIVRMYSPTSILDIKQGPKEPFRDYVDRFYKTLRAEQATQEVKNWMTETLLVQNANPDCKTILKALGPAATLEEMMTACQGVGGPGHKARVLAEAMSQLTNSATVMMQRGNFRNQRQTVKCFNCGKEGHIAKNCRAPRKKGCWKCGKEGHQMKDCIERQANFLGKIWPSHKGRPGNFLQSRPEPTAPPAPPEESFRFGEETATPSPKQEPIDKELYPSASLRSLFGNDL

SEQ ID NO: 516 - protein, 512 aa, Human immunodeficiency virus
MGARASVLSAGKLDKWEKIRLRPGGKKKYRLKHLVWASRELERFAVNPGLLETSEGCRQILEQLQPSIQTGSEELKSLFNTIATLYCVHQKIEVKDTKEALDKIEEEQNKSKKKAQQAAAGAGNSSQVSVSQNYPIVQNLQGQMVHQAISPRTLNAWVKVVEEKAFSPEVIPMFTALSEGATPQDLNTMLNTVGGHQAAMQMLKETINEEAAEWDRLHPVQAGPVAPGQMREPRGSDIAGTTSTLQEQVGWMTSNPPIPVGEIYKRWIIMGLNKIVRMYSPTSILDIRQGPKEPFRDYVDRFYKTLRAEQASQDVKNWMTETLLVQNSNPDCKTILKALGPGATLEEMMTACQGVGGPSHKARILAEAMSQVTNSATIMMQKGNFRNQRRTVKCFNCGKEGHIARNCRAPRKGGCWKCGKEGHQMKDCTSERQANFLGKIWPSNKGRPGNFLQSRPEPAQSRLEPTAPPEESFRFGEETTTPSQKQESKDRDKELYPLASLKSLFGNDPSSQ

SEQ ID NO: 517 - protein, 498 aa, Human immunodeficiency virus
  misc_feature (203)..(203): Xaa can be any naturally occurring amino acid
  misc_feature (378)..(378): Xaa can be any naturally occurring amino acid
  misc_feature (396)..(396): Xaa can be any naturally occurring amino acid
  misc_feature (430)..(430): Xaa can be any naturally occurring amino acid
  misc_feature (440)..(440): Xaa can be any naturally occurring amino acid
MGARASVLSGGELDKWEKIRLRPGGKKQYKLKHIVWASRELERFAVNPSLLETSEGCRQILGQLQPSLQTGSEELKSLFNTVAVLYCVHQRIDIKDTKEALDKIEEEQNKSKKKTQQAAADAGSQVSQNYPIVQNLQGQMVHQPISPRTLNAWVKVVEEKAFSPEVIPMFTALSEGATPQDLNTMLNTVGGHQAAMQMLKEAXNEEAADWDRTHPVHAGPVAPGQLREPRGSDIAGTTSTLQEQIQWMTNNPPIPVGEIYKRWIILGLNKIVRMYSPSSILDIKQGPKEPFRDYVDRFYKTLRAEQASQDVKNWMTETLLVQNANPDCKTILRALGPGATLEEMMTACQGVGGPSHKARVLAEAMSQVQGPPAIMMQXGNFRNQGRIIKCFNCGKXGHIAKNCRAPRRRGCWKCGKEGHQMKDCTEKQAXFLGKIWPSHXGRPGNFLQNRPEPTAPPEESFRFGEETTTPPQKQEPIEKDLYPTASLRSLFGNDPLSQ

SEQ ID NO: 518 - protein, 498 aa, Human immunodeficiency virus
  misc_feature (129)..(129): Xaa can be any naturally occurring amino acid
  misc_feature (362)..(362): Xaa can be any naturally occurring amino acid
MGARASVLSGGELDRWEKIRLRPGGNKKYKLKHLVWASRELERFAVNPGLLETADGCKQIMKQLQPALQTGSEELKSLFNTVATLYCVHQRIEIKDTKEALEKIEEEQNKSKKKEAQQAAADPGNSSQXSQNYPIVQNMQGQMVHQAISPRTLNAWVKVVEEKAFSPEVIPMFSALSEGATPQDLNTMLNTVGGHQAAMQMLKETINEEAAEWDRLHPVHAGPIAPGQMREPRGSDIAGTTSTLQEQINWMTNNPPIPVGEIYKRWIILGLNKIVRMYSPTSILDIKQGPKEPFRDYVDRFYKTLRAEQASQEVKNWMTETLLVQNANPDCKTILKALGPAATLEEMMTACQGVGGPGHKAXVLAEAMSQVTNSATIMMQRGNFKKQRRIVKCFNCGKEGHIARNCRAPRKKGCWKCGKEGHQMKDCTERQANFLGKIWPSHKGRPGNFLQSRPEPTAPPEESFRFGEETTTPSQKQESIDKEMYPLASLRSLFGNDP

SEQ ID NO: 519 - protein, 502 aa, Human immunodeficiency virus
  misc_feature (74)..(74): Xaa can be any naturally occurring amino acid
  misc_feature (280)..(280): Xaa can be any naturally occurring amino acid
  misc_feature (290)..(290): Xaa can be any naturally occurring amino acid
  misc_feature (409)..(409): Xaa can be any naturally occurring amino acid
  misc_feature (461)..(461): Xaa can be any naturally occurring amino acid
  misc_feature (501)..(501): Xaa can be any naturally occurring amino acid
MGARASVLSGGELDRWEKIRLRPGGKKKYKLKHIIWASRELERFAINPGLLETSEGCRQILGQLQPALPTGSEXCKSLFNTVAVLYCVHQRIEVKDTKEALEKIEEEQNKSKKKAQQAAADTGKSNPVSQNYPIVQNLQGQMVHQAISPRTLNAWVKVIEEKAFSPEVIPMFSALSEGATPQDLNTMLNTVGGHQAAMQMLKETINEEAAEWDRLHPVHAGPIAPGQMREPRGSDIAGTTSTLQEQIGWMTNNPPIPVGEIYKRWIILGLNKIVRMYSPXSILDIRQGPXEPFRDYVDRFYKTLRAEQATQEVKNWMTETLLVQNANPDCKTILKALGPAATLEEMMTACQGVGGPSHKARILAEAMSQVTNSATVMMQRGNFRNQRKIVKCFNCGKEGHIAKNCRAPXKKGCWKCGKEGHQMKDCTERQANFLGKIWPSHKGRPGNFLQSRPEPTAPTAXPEESFRFGEETIPSQKQEVIDKELYPSASLRSLFGNDPLXQ

SEQ ID NO: 520 - protein, 501 aa, Human immunodeficiency virus
MGARASILSGGELDRWEKIRLRPGGKKRYRLKHLVWASRELERFAVNPGLLETSDGCRQILIQLQPALQTGSEELKSVYNTVATLYCVHQRIDVRDTKEALDKIEEEQNKSKKKAQQAAADTGNSSQVSQNYPIVQNLQGQMVHQPISPRTLNAWVKVVEEKAFSPEVIPMFSALAEGATPQDLNTMLNTVGGHQAAMQMLKETINEEAAEWDRLHPVHAGPVAPGQMREPRGSDIAGTTSTLQEQIGWMTNNPPIPVGEIYKRWIILGLNKIVRMYSPTSILDIKQGPKEPFRDYVDRFYKTLRAEQATQEVKNWMTETLLVQNANPDCKTILKALGPAATLEEMMTACQGVGGPGHKARVLAEAMSQMTNSANIMMQRGNFKNQRRTVKCFNCGKEGHIAKNCRAPRKKGCWKCGKEGHQMKDCTERQANFLGKIWPSHKGRPGNFLQSRPEPSAPPEESFRFGEKTITPPQKQEPIDKDERYPLTALKSLFGNDPLSQ

SEQ ID NO: 521 - protein, 510 aa, Human immunodeficiency virus
  misc_feature (445)..(445): Xaa can be any naturally occurring amino acid
  misc_feature (477)..(477): Xaa can be any naturally occurring amino acid
MGARASILSGGELDRWEGIRLRPGGKKKYRLKHIVWASRELDRFALNPGLLETAEGCRQILGQLQSSLPTGSEEIKSLFNTVATLYCVHQRIDVKDTKEALDKIEEEQNKSKKKAQQAAAAAGNSSNAGNSSSQVSQNYPIVQNLQGQMVHQAISPRTLNAWVKVVEEKAFSPEVIPMFTALSEGATPQDLNTMLNTVGGHQAAMQMLKETINEEAAEWDRVHPVQAGPVAPGQMREPRGSDIAGTTSTLQEQIGWMTSNPAIPVGEIYKRWIILGLNKIVRMYSPTSILDIRQGPKEPFRDYVDRFYKTLRAEQASQEVKAWMTETLLVQNANPDCKTILKALGPAPTLEEMMTACQGVGGPGHKARVLAEAMSQVTNPAAIMMQKSNFRNHRKPVKCFNCGKEGHIAKNCRAPRKRGCWKCGKEGHQMKDCTERQANFLGKIXPSHKGRPGNFLQSRPEPTAPSAPPAESFRFGXETATPSQKQEPMEKELYPSAALKSLFGNDPLSQ

SEQ ID NO: 522 - protein, 500 aa, Human immunodeficiency virus
  misc_feature (24)..(24): Xaa can be any naturally occurring amino acid
  misc_feature (117)..(117): Xaa can be any naturally occurring amino acid
  misc_feature (143)..(143): Xaa can be any naturally occurring amino acid
  misc_feature (201)..(201): Xaa can be any naturally occurring amino acid
  misc_feature (223)..(223): Xaa can be any naturally occurring amino acid
  misc_feature (261)..(261): Xaa can be any naturally occurring amino acid
  misc_feature (280)..(280): Xaa can be any naturally occurring amino acid
  misc_feature (295)..(295): Xaa can be any naturally occurring amino acid
  misc_feature (409)..(409): Xaa can be any naturally occurring amino acid
  misc_feature (435)..(435): Xaa can be any naturally occurring amino acid
  misc_feature (463)..(463): Xaa can be any naturally occurring amino acid
  misc_feature (465)..(465): Xaa can be any naturally occurring amino acid
  misc_feature (470)..(470): Xaa can be any naturally occurring amino acid
  misc_feature (482)..(482): Xaa can be any naturally occurring amino acid
  misc_feature (497)..(497): Xaa can be any naturally occurring amino acid
MGARASVLSGGELDRWEKIRLRPXGKKKYRLKHIVWASRELERFAVNPGLLETSEGCRQILGQLQPALQTGSEELRSLYNTIATLYCVHQKIDIKDTKEALDKIEEEQNKSKKKAQXAAADTGNSSQVSQNYPVVQNLQGQMXYQALSPRTLNAWVKVVEEKAFSPEVIPMFTALSEGATPQDLNTMLNTVGGHQAAMQMXKETINEEAAEWDRLHPVHAGPXAPGQMREPRGSDIAGTTSTPQEQVAWMTSNPPIPVGEXYKRWIILGLNKIVRMYSPXSILDIRQGPKEPFRXYVDRFYKTLRAEQATQEVKNWMTETLLVQNANPDCKTILKALGPAATLEEMMSACQGVGGPGHKARVLAEAMSQVTNPATIMMQKGNFRNQRKSVKCFNCGREGHIAKNCRAPXKKGCWKCGKEGHQMKDCTERQANFLXKIWPSHKGRPGNFLQSRPEPTAPPEESXRXGEEMXTPAQKQEPIDKXLYPLTSLKSLFGNDXSSQ

SEQ ID NO: 523 - protein, 499 aa, Human immunodeficiency virus
MGARASVLSSGELDKWEKIRLRPGGKKRYQLKHIVWASRELERFAVNPGLLETSEGCRQILRQLQPSLQTGSEELKSLFNTVAVLYCVHQKIEVKDTKEALDKIEEEQNKSKKKEQQAAADTGNSSQVSQNYPIVQNMQGQMVHQAISPRTLNAWVKVVEEKAFSPEVIPMFAALSEGATPQDLNTMLNTVGGHQAAMQMLKETINEEAAEWDRLHPVHAGPPAPGQMREPRGSDIAGTTSTLQEQIAWMTSNPPVQVGEIYKRWIILGLNKIVRMYSPTSILDIRQGPKEPFRDYVDRFYKTLRAEQASQDVKNWMTETLLVQNANPDCKTILKALGPAATLEEMMTACQGVGGPSHKARVLAEAMSQANSTTIMMQRGNFKNQRKGVKCFNCGKEGHIARHCKAPRRKGCWKCGKEGHQIKDCTERQANFLGKIWPSHKGRPGNFLQSRPEPTAPPAESFRFGEETTTPSQKQETVDKELYPVTSLKSLFGNDPLSQ

SEQ ID NO: 524 - protein, 506 aa, Human immunodeficiency virus
  misc_feature (7)..(7): Xaa can be any naturally occurring amino acid
  misc_feature (189)..(189): Xaa can be any naturally occurring amino acid
  misc_feature (386)..(386): Xaa can be any naturally occurring amino acid
MGARASXLSGGQLDKWERIRLRPGGKKKYQLKHIVWASRELERFAVNPGLLETSEGCRQILKQLQPSLQTGSEELRSLFNTIATLYCVHQRIDVKDTKEALEKIEEEQNKSKEKAQQAAAAAATGNSSQNSSQVSQNYPIVQNLQGQMVHQAMTPRTLNAWVKVIEEKAFSPEVIPMFSALSEGATPQXLNTMLNTVGGHQAAMQILKETINEEAAEWDRLHPVHAGPIAPGQMREPRGSDIAGTTSTLQEQIGWMTNNPPIPVGDIYKRWIILGLNKIVRMYSPTSILDIKQGPKEPFRDYVDRFYKVLRAEQASQDVKNWMTETLLVQNANPDCKTILKALGPAATLEEMMTACQGVGGPGHKARVLAEAMSQMTNSAAIMMQXGNFRGQRKTVKCFNCGREGHIARNCKAPRKKGCWKCGREGHQMKDCTERQANFLGKIWSSHKGRPGNFVQNRPEPTAPPAESFGFGEEMTTPSQTQEPKDKELYPLSSLKSLFGNDPSSQ

SEQ ID NO: 525 - protein, 508 aa, Human immunodeficiency virus
  misc_feature (214)..(214): Xaa can be any naturally occurring amino acid
  misc_feature (377)..(377): Xaa can be any naturally occurring amino acid
  misc_feature (393)..(393): Xaa can be any naturally occurring amino acid
  misc_feature (405)..(405): Xaa can be any naturally occurring amino acid
  misc_feature (411)..(411): Xaa can be any naturally occurring amino acid
  misc_feature (429)..(429): Xaa can be any naturally occurring amino acid
  misc_feature (469)..(469): Xaa can be any naturally occurring amino acid
MGARASVLSGGKLDQWEKIRLRPMGKKKYKLKHIVWASRELERFALNANLLETSEGCKQIMEQLQPALNTGTEELKSLFNTVATLYCVHKRIEVKDTKEALDKVEEEQNKSKKKAPQAAAAAATGNSSQVSQNYPIVQNLQGQMIHQAISPRTLNAWVKVIEEKAFSPEVIPMFVALSEGSTPQDLNTMLNTVGGHQAAMQMLKETINEEAAEXDRTHPVHAGPVAPGQMREPRGSDIAGTTSTLQEQIAWMTSNPPVPVGEIYKKWIILGLNKIVRMYSPVSILDIRQGPKEPFRDYVDRFYKVLRAEQASQDVKNWMTETLIVQNANPDCKTILKALGPGATLEEMMTACQGVGGPGHKARVLAEAMSQVTNSTXIMMQNGNFRGQRKIVXCFNCGKEGHIAXNCKAPXKKGCWKCGKEGHQMKDCXERQANFLGKIWPSYKGRPGNFLQSRPEPTQSRLEPTAPPXESFRFGEETTPPQKQEKTDKELYPLTSLRSLFGSDPSSQ

SEQ ID NO: 526 - protein, 500 aa, Human immunodeficiency virus
  misc_feature (55)..(55): Xaa can be any naturally occurring amino acid
  misc_feature (85)..(85): Xaa can be any naturally occurring amino acid
  misc_feature (94)..(94): Xaa can be any naturally occurring amino acid
  misc_feature (105)..(105): Xaa can be any naturally occurring amino acid
  misc_feature (116)..(116): Xaa can be any naturally occurring amino acid
  misc_feature (235)..(235): Xaa can be any naturally occurring amino acid
  misc_feature (460)..(460): Xaa can be any naturally occurring amino acid
MGARASVLSGGELDRWEKIRLRPGGKKKYKLKHIVWASRELERFAVNPGLLETSXGCRQILGQLQPALQTGSEELKSVYNTVATXYCVHQRIDXKDTKDALDKIXEEQNKSKKKAXQAAADTGNRSQVSQNYPIVRNLQGQMVHQALTPRTLNAWVKVVEEKAFSPEVIPMFSALSEGATPSDLNTMLNTVGGHQAAMQMLKETINEEAADWDRMHPVHAGPIAPGQMREPRGSXIAGTTSTLQEQIDWMTGNPPIPVGEIYKRWIILGLNKIVRMYSPSSILDIKQGPKEPFRDYVDRFYKTLRAEQASQEVKNWMTETLLVQNANPDCKTILKALGPAATLEEMMTACQGVGGPSHKARVLAEAMSQVTNSATIMMQKGNYRDQRRTVKCFNCGKEGHIAKNCRAPRKKGCWKCGREGHQMKDCTERQANFLGKIWPSHKGRPGNFLQSRPEPTAPPXESFRFGEETTTSPQKQEPRDEELYPSASLRSLFGNDPSSQ

SEQ ID NO: 527 - protein, 505 aa, Human immunodeficiency virus
MGARASVLSGGQLDKWEKIRLRPGGKKKYQLKHIVWASRELERFAVNPGLLETSKGCRQILEQLQPALRTGSEELKSVYNTVATLYCVHQGIDVRDTKEALDKIEEEQNKSKQKAQQAAADTGNSSQVSQNYPIVQNLQGQMVHQAISPRTLNAWVKVIEEKAFSPEVIPMFTALSEGATPQDLNTMLNTVGGHQAAMQMLKETINEEAAEWDRTHPVHAGPVAPGQMREPRGSDIAGTTSTLQEQIAWMTSNPAIPVGEIYKRWIILGLNKIVRMYSPVSILDIRQGPKEPFRDYVDRFYKTLRAEQASQDVKNWMTETLLVQNANPDCKTILKALGPAATLEEMMTACQGVGGPGHKARVLAEAMSQVQHSTAIMMQNGNFRGQKKSVKCFNCGKVGHIARNCRAPRKKGCWKCGKEGHQMKDCSERQANFLGKLWPSHKGRPGNFLQSRPEPTAPPAESFGFGEETTTPPQKQEPIDRDMNKDLYPPLASLRSLFGNDHSSQ

SEQ ID NO: 528 - protein, 499 aa, Human immunodeficiency virus
  misc_feature (18)..(18): Xaa can be any naturally occurring amino acid
  misc_feature (26)..(26): Xaa can be any naturally occurring amino acid
  misc_feature (173)..(173): Xaa can be any naturally occurring amino acid
  misc_feature (361)..(361): Xaa can be any naturally occurring amino acid
  misc_feature (476)..(476): Xaa can be any naturally occurring amino acid
MGARASVLSGGKLDRWEXIRLRPGGXKRYKLKHLVWASRELERFAVNPGLLETSEGCRQILGQLQPSLQTGSEELRSLYNTVATLYCVHQGIEVKDTKEALDKVEEEQNKSKRTQQAAADTGNSSQVSQNYPIVQNLQGQMIYQSLSPRTLNAWVKVVEEKAFSPEVIPMFSXLSEGATPQDLNTMLNTVGGHQAAMQMLKETINEEAAEWDRLHPVHAGPVAPGQMREPRGSDIAGTTSTPQEQIGWMTSNPPIPVGEIYKRWIILGLNKIVRMYSPTSILDIRQGPKEPFRDYVDRFYKTLRAEQATAEVKNWMTETLLVQNANPDCKTILKALGPGASLEEMMTACQGVGGPGHKARXLAEAMSQMTNSNTIMMQGGNFRNQRKKIKCFNCGREGHVAKNCRAPRKKGCWKCGKEGHQMKDCTERQANFLGKIWPSSKGRPGNFPQSRLEPTAPPEESLSFREEKTTPSQKQXPIDKELYPLASLRSLFGNDPSST

SEQ ID NO: 529 - protein, 505 aa, Human immunodeficiency virus
  misc_feature (24)..(24): Xaa can be any naturally occurring amino acid
  misc_feature (28)..(28): Xaa can be any naturally occurring amino acid
  misc_feature (30)..(30): Xaa can be any naturally occurring amino acid
  misc_feature (58)..(58): Xaa can be any naturally occurring amino acid
  misc_feature (114)..(114): Xaa can be any naturally occurring amino acid
  misc_feature (138)..(138): Xaa can be any naturally occurring amino acid
  misc_feature (232)..(232): Xaa can be any naturally occurring amino acid
  misc_feature (411)..(411): Xaa can be any naturally occurring amino acid
  misc_feature (416)..(416): Xaa can be any naturally occurring amino acid
  misc_feature (440)..(440): Xaa can be any naturally occurring amino acid
  misc_feature (449)..(449): Xaa can be any naturally occurring amino acid
  misc_feature (468)..(468): Xaa can be any naturally occurring amino acid
MGARASVLSGGELDKWERIRLRPXGKKXYXLKHIVWASRELERFAVNPGLLETSAGCXQILGQLQPSLQTGSEELKSLYNTIATLYCVHQRIDVKDTKEALEKIEEEQNKSKKXAQQAAADTGNSSQGSGSQVSQNYXIVQNLQGQMVHQAISPRTLNAWVKVIEEKAFSPEVIPMFSALSEGATPQDLNTMLNTVGGHQAAMQMLKETINEEAAEWDRLHPVHAGPVAPGXMREPRGSDIAGTTSTLQEQIGWMTNNPPIPVGEIYKRWIILGLNKIVRMYSPVSILDIKQGPKEPFRDYVDRFYRTLRAEQASQEVKNWMTETLLVQNANPDCKTILKALGPAATLEEMMTACQGVGGPGHKARVLAEAMSQVTNSAAIMMQKGNFRNQRKTVKCFNCGKEGHIAKNCXAPRKXGCWKCGREGHQMKDCTERQANFLXKIWPSYKGXPGNFLQSRPEPTAPTAPPXESFRFGEEMTTPPQKQELIDKELYPSASLKSLFGNDP

SEQ ID NO: 530 - protein, 504 aa, Human immunodeficiency virus
  misc_feature (45)..(45): Xaa can be any naturally occurring amino acid
  misc_feature (88)..(88): Xaa can be any naturally occurring amino acid
  misc_feature (103)..(103): Xaa can be any naturally occurring amino acid
  misc_feature (106)..(106): Xaa can be any naturally occurring amino acid
  misc_feature (121)..(121): Xaa can be any naturally occurring amino acid
  misc_feature (351)..(351): Xaa can be any naturally occurring amino acid
  misc_feature (380)..(380): Xaa can be any naturally occurring amino acid
  misc_feature (486)..(486): Xaa can be any naturally occurring amino acid
MGARASILSGGELDRWEKIRLRPGGKKKYRLKHLVWASRELERFXVNPGLLETAEGCRQILGQLQPALQTGSEELKSVYNTVATLYCXHQKIDIKDTKEALDXIEXEQNKSKKKAQQAAAXTGNNSQVSQNYPIVQNLQGQMVHQALSPRTLNAWVKVVEEKAFSPEVIPMFSALSEGATPQDLNTMLNTVGGHQAAMQMLKETINEEAAEWDRLHPVHAGPIAPGQMREPRGSDIAGTTSTLQEQIAWMTNNPPIPVGEIYKRWIILGLNKIVRMYSPTSILDIRQGPKEPFRDYVDRFYKTLRAEQASQEVKNWMTETLLVQNANPDCKTILKALGPGATLEEMMTACXGVGGPSHKARVLAEAMSQATNSANIMMQXGNFKNQRKTVKCFNCGKEGHIARNCRAPRKKGCWKCGKEGHQMKDCVERQANFLGKIWPSHKGRPGNFLQSRPEPTAPPEESFRFGEETTTPSQKQSQKQEPIDKXLYPLTSLRSLFGNDPSSQ

SEQ ID NO: 531 - protein, 499 aa, Human immunodeficiency virus
  misc_feature (220)..(220): Xaa can be any naturally occurring amino acid
  misc_feature (348)..(348): Xaa can be any naturally occurring amino acid
  misc_feature (351)..(351): Xaa can be any naturally occurring amino acid
  misc_feature (353)..(353): Xaa can be any naturally occurring amino acid
  misc_feature (358)..(358): Xaa can be any naturally occurring amino acid
  misc_feature (361)..(361): Xaa can be any naturally occurring amino acid
  misc_feature (372)..(372): Xaa can be any naturally occurring amino acid
MGARASVLSGGKLDNWERIRLRPGGSKRYKLKHIVWASRELERFAVNPGLMETAEGCQQILGQLQPALQTGSEELKSLYNTIAVLYCVHQRIDVRDTKEALDKIEEEQNKSKKKAQQATADAGTSSQVSQNYPIVQNLQGQMVHQAISPRTLNAWVKVIEEKAFSPEVIPMFSALSEGATPQDLNTMLNTVGGHQAAMQMLKETINEEAAEWDRMHPVQXGPVAPGQIREPRGSDIAGTTSTLQEQITWMTSNPPIPVGEVYKRWIILGLNKIVRMYSPVSILDIRQGPKEPFRDYVDRFYKTLRAEQASQDVKNWMTETLLVQNANPDCKTILKALGPAATLEEMMXACXGXGGPGXKAXVLAEAMSQVTXSATIMMQRGNFRNQRKIVKCFNCGKEGHIAKNCRAPRKKGCWKCGKEGHQMKDCIERQANFLGKIWPSNKGRPGNFLQSRPEPTAPPEESFRFGKETTTPSQKQESKEELYPLTSLRSLFGNDPSSQ

SEQ ID NO: 532 - protein, 506 aa, Human immunodeficiency virus
MGARASVLSGGELDRWEKIRLRPGGKKKYRLKHIVWASRELERFAVNPSLLETSEGCRQILRQLQPSLQTGSEELKSLYNTIATLYCVHQRIEVKDTKEALDKIEEEQNKSKKKAQQAAADMGNSSQASVSQASVSQNYPIVQNLQGQMVHQPLTPRTLNAWVKVVEEKAFSPEVIPMFSALSEGATPQDLNTMLNTVGGHQAAMQMLKETINEEAAEWDRLHPVHAGPIAPGQMREPRGSDIAGTTSTLQEQIGWMTNNPPIPVGEIYKRWIILGLNKIVRMYSPISILDIKQGPKEPFRDYVDRFYKTLRAEQASQEVKNWMTETLLVQNANPDCKTILKALGPAATLEEMMTACQGVGGPGHKARVLAEAMSQVTNSATIMMQKGNFRSQRKIVKCFNCGKEGHIARSCRAPRKRGCWKCGKEGHQMKDCTERQANFLGKIWPSHKGRPGNFLQSRPEPSAPPEESFGFGEEATPSQKQEPRDKETYPLASLRSLFGNDPSSQ

SEQ ID NO: 533 - protein, 504 aa, Human immunodeficiency virus
MGARASVLSGGELDRWEKIRLRPGGKKKYRLKHIVWASRELERFAVNPGLLETSEGCRQILGQLQPSLQTGSEELRSLYNTVATLYCVHQKIDVKDTKEALEKVEEEQNKSKKKAQQAAADTGNSSKVSQNYPIVQNLQGQMVHQAISPRTLNAWVKVVEEKAFSPEVIPMFAALSEGATPQDLNTMLNTVGGHQAAMQMLKETINEEAAEWDRLHPVHAGPVAPGQMREPRGSDIAGTTSTLQEQIGWMTNNPPTPVGEIYKRWIILGLNKIVRMYSPTCILDIKQGPKEPFRDYVDRFYKTLRAEQASQEVKNWMTETLLVQNSNPDCKTILKALGPAATLEEMMTACQGVGGPGHKARVLAEAMSQVTNSATIMMQKGNFRNQRKTVKCFNCGKEGHIARNCRAPRKRGCWKCGKEGHQMKDCTERQANFLGKIWPSHKGRPGNFLQSRPEPTAPPEESFRFGEETPTPSQKQEPLIDLDKELLYPLASLRSLFGNDPSSK

SEQ ID NO: 534 - protein, 504 aa, Human immunodeficiency virus
MGARASVLSGGELDRWEKIRLRPGGKKRYKLKHIVWASRELERFAVNPGLLETSEGCRQILGQLQPALQTGSEELKSLYNTVATLYCVHQRIDVKDTKEALDKIEEEQNKSKKKAQQAAADTGNSSQVSQNYPIVQNMQGQMVHQAISPRTLNAWVKVIEEKAFSPEVIPMFSALSEGATPQDLNTMLNTVGGHQAAMQMLKETINEEAAEWDRLHPVQAGPVAPGQMREPRGSDIAGTTSTLQEQIGWMTNNPPIPVGEIYKRWIILGLNKIVRMYSPVSILDIRQGPKEPFRDYVDRFYKTLRAEQASQEVKNWMTETLLVQNANPDCKTILKALGPAATLEEMMTACQGVGGPGHKARVLAEAMSQITTPPNIMMQRGNFRNQRKVVKCFNCGKEGHIAKNCRAPRKKGCWKCGKEGHQMKDCTERQANFLGKIWPSSKGRPGNFPQSRTEPTAPPAPPEESFRFGEETTTPPQKQEPPIDRELYPLASLRSLFGNDPSSQ

SEQ ID NO: 535 - protein, 502 aa, Human immunodeficiency virus
MGARASVLSGGELDRWEKIRLRPGGKKRYKLKHIVWASRELERFAVNPGLLETSGGCRQILGQLQPSLQTGSEELKSLYNTIAVLYCVHQRIEVKDTKEALDKIEEEQNKCKKKAQQAAAAADTGNSSQVSQNYPIVQNLQGQMVHQAISPRTLNAWVKVVEEKAFSPEVIPMFSALSEGATPQDLNTMLNTVGGHQAAMQMLKETINEEAAEWDRMHPVHAGPVAPGQMREPRGSDIAGTTSTLQEQVGWMTSNPPIPVGEIYKRWIILGLNKIVRMYSPTSILDIRQGPKEPFRDYVDRFYKTLRAEQASQEVKNWMTETLLVQNANPDCKTILKALGPGATLEEMMTACQGVGGPSHKARVLAEAMSQTTSAAAIMMQRGNFRNQRKPVKCFNCGKEGHIAKNCRAPRKRGCWKCGKEGHQMKDCTERQANFLGKIWPSHKGRPGNFLQSRPEPTAPPEESFRFGEETTTPPQKQEPRDKELYPLASLRSLFGNDPSSQ

SEQ ID NO: 536 - protein, 498 aa, Human immunodeficiency virus
  misc_feature (359)..(359): Xaa can be any naturally occurring amino acid
MGARASVLSGGELDKWEKIRLRPGGKKKYRLKHIVWASRELERFAVNPGLLETSDGCRQILEQLQPSLQTGSEELRSLFNTIAVLFCVHQRIEVKDTKEALDKIEEIQNKSKKKAQQAAADTKNNSQVSQNYPIVQNMQGQMVHQPISPRTLNAWVKVVEEKAFSPEVIPMFTALSEGATPQDLNTMLNTVGGHQAAMQMLKETINEEAAEWDRLHPVHAGPIAPGQMREPRGSDIAGTTSTLQEQIGWMTNNPPIPVGEIYKRWIILGLNKIVRMYSPTSILDIKQGPKEPFRDYVDRFYKTLRAEQASQEVKNWMTETLLVQNANPDCKTILKALGPAATLEEMMSACQGVGGPAHXARVLAEAMSQVTNPTAIMMQRGNFKNQRKIVKCFNCGKEGHIAKNCRAPRKKGCWKCGREGHQMKDCTERQANFLGKIWPSYKGRPGNFLQSRPEPTAPPEESFRFGEEITTQKQEPIDKEQYPLASLRSLFGNDPSSQ

SEQ ID NO: 537 - protein, 502 aa, Human immunodeficiency virus
  misc_feature (440)..(440): Xaa can be any naturally occurring amino acid
MGARASVLSGEKLDRWEKIRLRPGGKKRYKLKHIVWASRELERFAVNPGLLETSEGCKQILEQLQPSLQTGSEELRSLFNTIATLYCVHQRIDVKDTKEALDKIEEEQNKSKKKAQQAAAAADPGKSSQVSQNYPIVQNLQGQMVHQALSPRTLNAWVKVIEEKAFSPEVIPMFSALSEGATPQDLNTMLNTVGGHQAAMQMLKETINEEAAEWDRLHPAQAGPVAPGQMRDPRGSDIAGTTSTLQEQIGWMTGNPPIPVGEIYKRWIILGLNKIVRMYSPVSILDIRQGPKEPFRDYVDRFYKTLRAEQASQEVKNWMTETLLVQNANPDCKTILKALGPAATLEEMMTACQGVGGPGHKARVLAEAMSQVTNSGAIMMQKGNFRNQRKTVKCFNCGREGHIAKNCRAPRKKGCWKCGKEGHQMKDCTERQANFLGKIXPSHKGRPGNFLQSRPEPTAPPAESFRFGEETATSSQKQEPIDKELYPLASLKSLFGNDPSSQ

SEQ ID NO: 538 - protein, 500 aa, Human immunodeficiency virus
  misc_feature (275)..(275): Xaa can be any naturally occurring amino acid
MGARASVLSAGELDKWEKIRLRPGGKKKYRLKHIVWASRELERFGLNPGLLETSEGCRQILAQLYPSLQTGSEELRSLYNTVATLYCVHQKIEVKDTKEALDKIEEEQNKSKQKAQPAAADTGNNSKVSQNYPIVQNLQGQMVHQPLSPRTLNAWVKVVEEKAFSPEVIPMFTALSEGATPQDLNTMLNTVGGHQAAMQMLKETINEEAAEWDRLHPVHAGPIAPGQMREPRGSDIAGTTSTLQEQIGWMTNNPPIPVGEIYKRWIILGLNKIVXMYSPTSILDIKQGPKEPFRDYVDRFYKTLRAEQASQDVKNWMTETLLVQNANPDCKTILKALGPAATLEEMMTACQGVGGPGHKARVLVEAMSQVTNSANIMMQRGNFRNQRKTVKCFNCGKEGHIARNCRAPRKKGCWKCGKEGHQMKDCTERQANFLGRIWPSPKGRPGNFLQSRPEPTAPPEESFRFGEETTTPPQKQEPIDKELYPLASLRSLFGNDPSSQ

SEQ ID NO: 539 - protein, 501 aa, Human immunodeficiency virus
MGARASVLSGGKLDRWEKIRLRPGGKKQYKLKHLVWASRELERFAVNPGLLETSEGCRQILRQLQPSLQTGSEELKSLYNLVATLYCVHQSIDVRDTKEALDKIEEEQKKEQQAAADTGNKSQVSQNYPIVQNLQGQMVHQALSPRTLNAWVKVVEEKAFSPEVIPMFSALSEGATPQDLNTMLNTVGGHQAAMQMLKETINEEAAEWDRLHPVQAGPVAPGQMRDPRGSDIAGTTSTLQEQIGWMTSNPPIPVGEIYKRWIIIGLNKIVRMYSPTSILDIRQGPKEPFRDYVDRFYKTLRAEQASQDVKNWMTETLLVQNANPDCKTILKALGPGATLEEMMTACQGVGGPSHKARVLAEAMSQVTNSASASIMAQRGNYGNQRKAIKCFNCGKEGHIARNCRAPRKKGCWKCGKEGHQMKDCAERQANFLGKIWPSHKGRPGNFLQSRPEPTAPPAPPEESFRFGEEKPTPSQKQEQTDKELYPLASLRSLFGNDPSSQ

SEQ ID NO: 540 - protein, 500 aa, Human immunodeficiency virus
  misc_feature (63)..(63): Xaa can be any naturally occurring amino acid
  misc_feature (84)..(84): Xaa can be any naturally occurring amino acid
  misc_feature (147)..(147): Xaa can be any naturally occurring amino acid
  misc_feature (293)..(293): Xaa can be any naturally occurring amino acid
  misc_feature (310)..(310): Xaa can be any naturally occurring amino acid
  misc_feature (351)..(351): Xaa can be any naturally occurring amino acid
MGARASVLSAGELDRWEKIRLRPGGKKQYKLKHIVWASRELERFAVNPGLMETSEGCRKILGXLQPSLQTGSEELRSLYNTIAXLYCVHQKIDVRDTKEALDKIEEEQNKSKTQQAAADTGNSNQVSQNYPIVQNVQGQMVHQPISXRTLNAWVKVVEEKAFSPEVIPMFTALSEGATPQDLNTMLNTVGGHQAAMQMLKETINEEAAEWDRLHPVHAGPIAPGQMREPRGSDIAGTTSTLQEQIAWMTNNPPIPVGDIYKRWIILGLNKIVRMYSPTSILDIKQGPKEPFRXYVDRFYKTLRAEQASQXVKNWMTETLLVQNANPDCKTILRALGPAATLEEMMTACQGXGGPSHKARVLAEAMSQVTNSTAIMMQKGNFRGQRKTIKCFNCGKEGHIAKNCRAPRRKGCWKCGKEGHQIKDCTERQANFLGKIWPSSKGGRPGNFLQSRPEPTAPPAESFSFGGEETTTPSQKQEPTNKELYPLASLRSLFGNDPSSQ

SEQ ID NO: 541 - protein, 500 aa, Human immunodeficiency virus
  misc_feature (477)..(477): Xaa can be any naturally occurring amino acid
MGARASVLSGGELDRWEKIRLRPGGKKKYQLKHIVWASRELERFAVNPGLLETSEGCRQILAQLQPSIQTGSEELKSLYNTVATLYCVHQKIEIKDTKEALDKIEEEQNKSKKKVQQAAADTGNSSQVSQNYPIVQNIQGQMVHQALSPRTLNAWVKVIEEKAFSPEVIPMFSALSEGATPQDLNTMLNTVGGHQAAMQMLKETINEEAAEWDRLHPVQAGPVAPGQMREPRGSDIAGTTSNLQEQIGWMTGNPPIPVGEIYKRWIILGLNKIVRMYSPVSILDIRQGPKEPFRDYVDRFYKTLRAEQATQEVKNWMTETLLVQNANPDCKTILKALGPAATLEEMMTACQGVGGPSHKARILAEAMSQVTNSTAIMMQRGNHRNQRKTIKCFNCGKEGHLARNCRAPRKRGCWKCGQEGHQMKECPGRQANFLGKVWPSHKGRPGNFLQNRPEPTAPPEESFRFGEETTTLSQKQXPTDKEMYPLASLRSLFGNDPSSQ

SEQ ID NO: 542 - protein, 502 aa, Human immunodeficiency virus
  misc_feature (18)..(18): Xaa can be any naturally occurring amino acid
  misc_feature (187)..(187): Xaa can be any naturally occurring amino acid
  misc_feature (375)..(375): Xaa can be any naturally occurring amino acid
  misc_feature (390)..(390): Xaa can be any naturally occurring amino acid
MGARASVLSGGKLDKWEXIRLRPGGKKRYHLKHIVWASRELERFAVNPGLLETSEGCRQIIGQLQPSLQTGSEELKSLYNTIAVLYCVHQNIDVRDTKEALEKIEEEQNKSKKKAQQAAADTGNSSGSKVSQNYPIVQNLQGQMVHQAISPRTLNAWVKVVEEKAFSPEVIPMFSALSEGATPQDLXTMLNTVGGHQAAMQMLKETINEEAAEWDRLHPVHAGPIAPGQMREPRGSDIAGTTSTLQEQIGWMTNNPPIPVGEIYKRWIIMGLNKIVRMYSPTSILDIRQGPKEPFRDYVDRFYKTLRAEQASQEVKNWMTETLLVQNSNPDCKTILKALGPAATLEEMMTACQGVGGPGHKARVLAEAMSQVTSXPTIMMQKGNFRNPKXTVKCFNCGREGHIAKHCRAPRKKGCWKCGKEGHQMKDCTERQANFLGKIWPSHKGRPGNFLQSRPEPTAPPEESFRFGEETTTPPQKQETINKDLYPLASLRSLFGNDPSSQ

SEQ ID NO: 543 - protein, 502 aa, Human immunodeficiency virus
  misc_feature (15)..(15): Xaa can be any naturally occurring amino acid
  misc_feature (20)..(20): Xaa can be any naturally occurring amino acid
  misc_feature (25)..(25): Xaa can be any naturally occurring amino acid
  misc_feature (30)..(30): Xaa can be any naturally occurring amino acid
  misc_feature (61)..(61): Xaa can be any naturally occurring amino acid
  misc_feature (74)..(74): Xaa can be any naturally occurring amino acid
  misc_feature (95)..(95): Xaa can be any naturally occurring amino acid
  misc_feature (102)..(102): Xaa can be any naturally occurring amino acid
  misc_feature (123)..(123): Xaa can be any naturally occurring amino acid
  misc_feature (492)..(492): Xaa can be any naturally occurring amino acid
  misc_feature (500)..(500): Xaa can be any naturally occurring amino acid
MGARASVLSGGELDXWEKIXLRPGXKKQYXLKHIVWASRELERFALNPGLLETSEGCRQIXGQLQPALQTGTEXLRSLFNTVATLYCVHQKIDVXDTKEALXKIEEEQTKSKKKAQQAAADTXNSSQISQNYPIVQNLQGQMVHQAISPRTLNAWVKVIEEKAFSPEVIPMFTALSEGATPQDLNTMLNTVGGHQAAMQMLKETINDEAAEWDRIHPVHAGPVAPGQMREPRGSDIAGTTSTLQEQIAWMTSNPPVPVGEIYKRWIILGLNKIVRMYSPTSILDIRQGPKEPFRDYVDRFYKTLRAEQASQDVKNWMTETLLVQNANPDCKTILKALGPGATLEEMMTACQGVGGPGHKARVLAEAMSQVTNSNAVMMQRGNFRNQRRSVKCFNCGKEGHIAKNCRAPRKKGCWKCGKEGHQMKDCTERQANFLGRIWPSYKGRPGNFLQSRPEPSAPPAESFMFGEETTTPPQKQESKDRDKETYPLASLXSLFGNDPXSQ

SEQ ID NO: 544 - protein, 499 aa, Human immunodeficiency virus
MGARASVLSGGELDKWEKIRLRPGGKKRYQLKHIVWASRELERFAVNPGLLETSEGCRQIIAQLQPSLQTGSEELRSLFNTVATLYCVHQRIEVKDTKEALEKIEEEQNKCKKKAQQAAADTGSNSQVSQNYPIVQNLQGQMVHQAISPRTLNAWVKVIEEKAFSPEVIPMFSALSEGATPQDLNTMLNTVGGHQAAMQMLKETINEEAAEWDRLHPVHAGPIAPGQMREPRGSDIAGSTSTLQEQIAWMTNNPPVPVGEIYKRWIILGLNKIVRMYSPVSILDIRQGPKEPFRDYVDRFYKTLRAEQASQEVKNWMTETLLVQNSNPDCKTILKALGPAATLEEMMTACQGVGGPSHKARILAEAMSQVTNPAAIMMQRGNFKNQRKPVKCFNCGKDGHISRNCKAPRKKGCWKCGREGHQMKDCTERQANFLGKIWPSQKGRPGNFLQNRTVPTAPPEESLRFGEETTPSQKQEPVDKELYPLASLRSLFGNDPSSQ

SEQ ID NO: 545 - protein, 505 aa, Human immunodeficiency virus
  misc_feature (211)..(211): Xaa can be any naturally occurring amino acid
  misc_feature (254)..(254): Xaa can be any naturally occurring amino acid
  misc_feature (287)..(287): Xaa can be any naturally occurring amino acid
  misc_feature (303)..(303): Xaa can be any naturally occurring amino acid
  misc_feature (305)..(305): Xaa can be any naturally occurring amino acid
  misc_feature (323)..(323): Xaa can be any naturally occurring amino acid
MGARASVLSGGKLDRWEKIRLRPGGKKKYQLKHIVWASRELDRFALNPGLLETSEGCKQILEQLQPALKTGTEEIRSLYNTVATLYCVHQGIEVKDTKEALDKIEEEQNKSKKKAQQAAAAADAGNNSQVSRNYPIVQNIQGQMVHQPISPRTLNAWVKVVEEKAFSPEVIPMFSALAEGATPQDLNTMLNTVGGHQAAMQMLKETINEEXAEWDRLHPVQAGPVAPGQMREPRGSDIAGTTSTLQEQIGWMTXNPPIPVGEIYKRWIIMGLNKIVRMYSPTSILDXRQGPKEPFRDYVDRFXKXLRAEQASQDVKNWMTETXLVQNSNPDCKTILKALGPGATLEEMMTACQGVGGPGHKARVLAEAMSQVTNSATVMMQKSNFRNQRKSVKCFNCGKEGHIAKNCRAPRKRGCWKCGKEGHQMKDCTERQANFLGKIWPSHKGRPGNFLQRRPEPTAPPAPPEESFRFGEETTTPSQKQEQVDKEMYPLASLRSLFGNDPSSP

SEQ ID NO: 546 - protein, 502 aa, Human immunodeficiency virus
  misc_feature (69)..(69): Xaa can be any naturally occurring amino acid
  misc_feature (489)..(489): Xaa can be any naturally occurring amino acid
MGARASVLSGGKLDRWEKIRLRPGGKKRYRLKHIVWASRELERFAVNPGLLETSIGCKQILEQLQSALXTGSEELKSLYNLVATLYCVHQGIDVKDTKEALDKIEEEQNKSKKKVQQAAADTGNQVSQVSQNYPIVQNLQGQMVHQALSPRTLNAWVKVVEEKAFSPEVIPMFTALSEGATPQDLNTMLNTVGGHQAAMQILKETINEEAAEWDRLHPVHAGPIAPGQMREPRGSDIAGTTSTLQEQIGWMTHNPPIPVGDIYKRWIILGLNKIVRMYSPTSILDIRQGPKEPFRDYVDRFYKTLRAEQASQEVKNWMTETLLVQNANPDCKTLLKALGPAATLEEMMTACQGVGGPGHKARVLAEAMSQINSAATTVMMQRGNFKNQRRTVKCFNCGKEGHIAKNCRAPRKKGCWKCGKEGHQLKDCTERQANFLGKIWPSHKGRPGNFLQSRPEPSAPPEESFRFGEEKTTPSQKQEPMDKELYPLXSLRSLFGNDPSSQ

SEQ ID NO: 547 - protein, 506 aa, Human immunodeficiency virus
  misc_feature (468)..(468): Xaa can be any naturally occurring amino acid
MGARASVLSGGDLDRWEKIRLRPGGKKKYKLKHIVWASRELERFAVNPGLLETSDGCKQILAQLQPSLQTGSEELKSLFNTIAVLYCVHQRIEIKDTKEALDKIEEEQNKSKKKAQQAAADTGNSSSQVSQNYPIVQNMQGQMVHQPLTPRTLNAWVKVIEEKNFSPEIIPMFTALSEGATPQDLNTMLNTVGGHQAAMQMLKETINEEAAEWDRSHPVHAGPIAPGQMREPRGSDIAGTTSNLQEQIGWMTNNPPIPVGEIYKRWIVLGLNKIVRMYSPTSILDIKQGPKEPFRDYVDRFYKTLRAEQASQEVKNWMTETLLVQNANPDCKTILRALGPAATLEEMMTACQGVGGPAHKARVLAEAMSQVTNSNTIMMQKGNFRGQRKPVKCFNCGKEGHIAKNCRAPRRRGCWKCGKEGHQMKDCTERQANFLGKIWPSNKGRPGNFLQSRPEPTAPPEESFRFGXEAATPSQKQEQLIDLDRDKELYPLTSLRSLFGSDPSSK

SEQ ID NO: 548 - protein, 509 aa, Human immunodeficiency virus
  misc_feature (40)..(40): Xaa can be any naturally occurring amino acid
  misc_feature (57)..(57): Xaa can be any naturally occurring amino acid
  misc_feature (62)..(62): Xaa can be any naturally occurring amino acid
  misc_feature (66)..(66): Xaa can be any naturally occurring amino acid
  misc_feature (84)..(84): Xaa can be any naturally occurring amino acid
  misc_feature (112)..(112): Xaa can be any naturally occurring amino acid
  misc_feature (166)..(166): Xaa can be any naturally occurring amino acid
  misc_feature (197)..(197): Xaa can be any naturally occurring amino acid
  misc_feature (260)..(260): Xaa can be any naturally occurring amino acid
  misc_feature (320)..(320): Xaa can be any naturally occurring amino acid
  misc_feature (326)..(326): Xaa can be any naturally occurring amino acid
  misc_feature (331)..(331): Xaa can be any naturally occurring amino acid
  misc_feature (388)..(388): Xaa can be any naturally occurring amino acid
  misc_feature (391)..(391): Xaa can be any naturally occurring amino acid
  misc_feature (408)..(408): Xaa can be any naturally occurring amino acid
  misc_feature (420)..(420): Xaa can be any naturally occurring amino acid
MGARASVLSGGELDKWEKIRLRPGGKKKYRLKHIVWASRXLERFAVNPGLLETSEGXRQILXQLQXSLQTGSEELRSLYNTIAXLYCVHQRIEVKDTKEALDKVEEEQNKSXKKAQQAAAGTGNNSQVSQNYPIVQNLQGQMVHQAISPRTLNAWVKVVEEKAFSXEVIPMFSALSEGATPQDLNTMLNTVGGHQAXMQMLKETINEEAAEWDRVHPVHAGPIAPGQMREPRGSDIAGTTSTLQEQIGWMTNNPPIPVGXIYKRWIILGLNKIVRMYSPTSILDIRQGPKEPFRDYVDRFYKTLRAEQASQEVKNWMTEXLLVQNXNPDCXTILKALGPAATLEEMMTACQGVGGPGHKARVLAEAMSQVNSSTMMMQRGNFRNQRKXVKXFNCGKEGHIAKNCRAPXKKGCWKCGKEGXQMKDCTERQANFLGKIWPSHKGRPGNFLQNRPEQNRPEPSRPEPSAPPEESFRFGEETATPPQKQETIDKELYPLTSLKSLFGNDPSSQ

SEQ ID NO: 549 - protein, 502 aa, Human immunodeficiency virus
  misc_feature (124)..(124): Xaa can be any naturally occurring amino acid
  misc_feature (246)..(246): Xaa can be any naturally occurring amino acid
  misc_feature (389)..(389): Xaa can be any naturally occurring amino acid
  misc_feature (444)..(444): Xaa can be any naturally occurring amino acid
  misc_feature (475)..(475): Xaa can be any naturally occurring amino acid
  misc_feature (481)..(481): Xaa can be any naturally occurring amino acid
  misc_feature (494)..(494): Xaa can be any naturally occurring amino acid
  misc_feature (502)..(502): Xaa can be any naturally occurring amino acid
MGARASVLSGGELDRWEKIRLRPGGKKKYKLKHIVWASRELERFAVNPGLLETSEGCRQILGQLQPSIRTGSEELKSLYNTVAVLYCVHQRIDVKDTKEALDKIEEEQNESKKKAQQAATAADXGNSNQVSQNYPIVQNLQGQMVHQAISPRTLNAWVKVIEEKAFSPEVIPMFSALSEGATPQDLNTMLNTVGGHQAAMQMLKETINEEAAEWDRLHPVHAGPIAPGQMREPRGSDIAGTTSTLXEQIGWMTNNPPIPVGEIYKRWIILGLNKIVRMYSPTSILDIRQGPKEPFRDYVDRFYKTLRAEQASQEVKNWMTETLLVQNANPDCKTILKALGPGATLEEMMTACQGVGGPGHKARVLAEAMSQVTNSASMMMQRSNFKNQXKTVKCFNCGKEGHIAKNCRAPRKKGCWKCGKEGHQMKDCTERQAIFLGKIWPSHXGRPGNFLQSRPEPTAPPAESFMFGEETTTPXQKQEPXDQGLYPLASLKSXFGNDPSSX

SEQ ID NO: 550 - protein, 500 aa, Human immunodeficiency virus
  misc_feature (21)..(21): Xaa can be any naturally occurring amino acid
  misc_feature (55)..(55): Xaa can be any naturally occurring amino acid
  misc_feature (88)..(88): Xaa can be any naturally occurring amino acid
  misc_feature (111)..(111): Xaa can be any naturally occurring amino acid
  misc_feature (120)..(120): Xaa can be any naturally occurring amino acid
  misc_feature (131)..(131): Xaa can be any naturally occurring amino acid
  misc_feature (138)..(138): Xaa can be any naturally occurring amino acid
  misc_feature (184)..(184): Xaa can be any naturally occurring amino acid
  misc_feature (258)..(258): Xaa can be any naturally occurring amino acid
  misc_feature (275)..(275): Xaa can be any naturally occurring amino acid
  misc_feature (284)..(284): Xaa can be any naturally occurring amino acid
  misc_feature (292)..(292): Xaa can be any naturally occurring amino acid
  misc_feature (312)..(312): Xaa can be any naturally occurring amino acid
  misc_feature (341)..(341): Xaa can be any naturally occurring amino acid
  misc_feature (371)..(371): Xaa can be any naturally occurring amino acid
  misc_feature (453)..(453): Xaa can be any naturally occurring amino acid
  misc_feature (477)..(477): Xaa can be any naturally occurring amino acid
MGARASVLSGGKLDKWEKIRXRPGGKKQYKLKHIVWASRELERFAVNPGLLETSXGCRQILEQLQPSLKTGSEELRSLFNTIATLWCXHRGIDVKDTKEALDKIEEEQNKXKKKAQQETXSTGNSSQVSQXYPIVRNXQGQMVHQAISPRTLNAWVKVVEEKAFSPEVIPMFAALSEGATPQDXNTMLNTVGGHQAAMQMLKETINEEAAEWDRLHPVHAGPIAPGQMREPRGSDIAGTTSTLEEQIAWITNNPPVPXGEIYKRWIILGLNKIVXMYSPTSILXIRQGPKEXFRDYVDRFYKTLRAEQASQXVKNWMTETLLVQNANPDCKTILKALGPAXTLEEMMTACQGVGGPGHKARVLAEAMSQVXNSTAIMMQRGNFRNQRKIVKCFNCGKEGHIAKNCRAPRKRGCWKCGKEGHQMKDCTERQANFLGKIWPSHKGRPGNFLQSRXEPTAPPEESFRFGEETTTPPQKQXQINKDMYPLASLRSLFGNDPSSQ

SEQ ID NO: 551 - protein, 500 aa, Human immunodeficiency virus
  misc_feature (460)..(460): Xaa can be any naturally occurring amino acid
MGARASVLSGGELDRWERIRLRPGGRKRYQLKHIVWASRELERFAVNPGLLETSEGCRQILEQLQPSLPVGSEEIRSLYNTVAVLYCVHQRIEVKDTKEALDKIEEEQNKSKKKAQPTAAGAGSSSQASQNFPIVQNLQGQMVHQPISPRTLNAWVKVVEEKAFSPEVIPMFSALSEGATPQDLNTMLNTVGGHQAAMQMLKETINEEAAEWDRLHPVHAGPIAPGQMREPRGSDIAGTTSTLQEQIGWMTNNPPIPVGEIYKRWIILGLNKIVRMYSPTSILDIRQGPKEPFRDYVDRFYKTLRAEQASQEVKNWMTETLLVQNANPDCKTILKALGPAATLEEMMTACQGVGGPGHKARVLAEAMSQVTNSATIMMQKGNFRNQRKNIKCFNCGKEGHIAKNCRAPRRKGCWKCGKEGHQMKDCTERQANFLGKIWPSHKGRPGNFLQSRPEPTAPPXESFRFGEETTTPSQKQEPTDKELYPLASLKSLFGNDPSSQ

SEQ ID NO: 552 - protein, 509 aa, Human immunodeficiency virus
MGARASVLSGGKLDQWEKIRLRPGGKKTYKLKHIVWVSRELERFAVNPGLLETAEGCKQILEHLQPSLQTGSEELKSLYNAVAVLCCVHQRIDVKDTKEALDKIEEEQNKSKKKAQQAAKAQQEAADTGNSNQVSQNYPIVQNLQGQMVHQALSPRTLNAWVKVVEEKAFSPEVIPMFSALSEGATPADLNTMLNTVGGHQAAMQMLKETINEEAAEWDRLHPVHAGPIAPGQMREPRGSDIAGTTSTLQEQIGWMTHNPPIPVGEIYKRWIILGLNKIVRMYSPVSILDIRQGPKEPFRDYVDRFYKTLRAEQASQDVKNWMTETLLVQNANPDCKTILKALGPAATLEEMMTACQGVGGPGHKARVLAEAMSQVTNSNTIMMQRGNFRNQRKTVKCFNCGKEGHIARNCRAPRKKGCWKCGKEGHQMKDCVERQANFLGKIWPSHKGRPGNFLQSRPEPTAPLEPTAPPEESFRFGEERATPSQKPEPIDKDRYPLASLRSLFGNDP

SEQ ID NO: 553 - protein, 507 aa, Human immunodeficiency virus
  misc_feature (319)..(319): Xaa can be any naturally occurring amino acid
  misc_feature (424)..(424): Xaa can be any naturally occurring amino acid
MGARASILSGGQLDRWEKIRLRPGGRKRYKLKHIVWASRELERFAVNPGLLETSDGCRQILGQLQPSLQTGSEELKSLYNTVAVLYCVHQRIEVKDTKEALEKIEEEQNKSKKKAQQAAAAAADTGNNSQVSQNYPIVQNMQGQMVHQAISPRTLNAWVKVVEEKAFSPEVIPMFSALSEGATPQDLNTMLNTVGGHQAAMQMLKETINEEAAEWDRLHPVHAGPIAPGQMREPRGSDIAGTTSTLQEQIGWMTHNPPIPVGEIYKRWIIMGLNKIVKMYSPVSILDIRQGPKEPFRDYVDRFYKTLRAEQATQEVKNXMTETLLVQNANPDCKTILKALGPAATLEEMMAACQGVGGPSHKARVLAEAMSQVTNSATIMMQKGNFKNQRKIVKCFNCGKEGHIARNCRAPRRKGCWKCGKEGXQLKDCAERQANFLGKIWPSHKGRPGNFLQSRPEPTAPPEESFRFGEETTTPSQKQDPKQDPIDKEMYPLTSLRSLFGNDPSSQ

SEQ ID NO: 554 - protein, 505 aa, Human immunodeficiency virus
MGARASVLSGGELDRWEKIRLRPGGKKKYKLKHIVWASRELERFAVNPGLLETSEGCRQILGQLQPSLQTGSEELKSLYNTVAVLYCVHQRIEVKDTKEALDKIEEEQNKSKKKAQQAAADTGNNSTGNSSEVSRNFPIVQNLQGQMVHQAISPRTLNAWVKVVEEKAFSPEVIPMFSALSEGATPQDLNTMLNTVGGHQAAMQMLKETINEEAAEWDRLHPQQAGPIAPGQIREPRGSDIAGTTSTLQEQITWMTNNPPIPVGEIYKRWIILGLHKIVRMYSPSSILDIKQGPKEPFRDYVDRFYKTLRAEQATQEVKNWMTETLLVQNANPDCKTILKALGPAATLEEMMTACQGVGGPAHKARVLAEAMSHVTNSATIMMQKGNFRNQRKIVKCFNCGKEGHIARNCRAPRKKGCWKCGKEGHQMKDCTERQANFLGKIWPSHKGRPGNFLQSRPEPTAPPEESFRFGEGTAIPSQKQEPIDKELYPLTSLRSLFGNDHSSQ

SEQ ID NO: 555 - protein, 499 aa, Human immunodeficiency virus
  misc_feature (40)..(40): Xaa can be any naturally occurring amino acid
  misc_feature (76)..(76): Xaa can be any naturally occurring amino acid
  misc_feature (92)..(92): Xaa can be any naturally occurring amino acid
  misc_feature (123)..(123): Xaa can be any naturally occurring amino acid
  misc_feature (126)..(126): Xaa can be any naturally occurring amino acid
  misc_feature (146)..(146): Xaa can be any naturally occurring amino acid
  misc_feature (202)..(202): Xaa can be any naturally occurring amino acid
  misc_feature (302)..(302): Xaa can be any naturally occurring amino acid
  misc_feature (364)..(364): Xaa can be any naturally occurring amino acid
  misc_feature (450)..(450): Xaa can be any naturally occurring amino acid
  misc_feature (471)..(471): Xaa can be any naturally occurring amino acid
MGARASVLSGGELDKWEKIRLRPGGKKKYRLKHIVWASRXLERFAVNPGLLETAEGCRQILGQLQPSLQTGSEELXSLYNTIAVLYCVHQRXEVKDTKEAVEKVEEEQNKSKKKAQAAADTKXSSXVSQNYPIVQNLQGQMVHQPXSPRTLNAWVKVVEEKAFSPEVIPMFTALSEGATPQDLNTMLNTVGGHQAAMQMLKXTINEEAAEWDRLHPVHAGPIAPGQMREPRGSDIAGTTSTLQEQIGWMTNNPPIPVGEIYKRWIILGLNKIVRMYSPTSILDIKQGPKEPFRDYVDRFYKXLRAEQASQEVKNWMTETLLVQNANPDCRTILKALGPAATLEEMMTACQGVGGPAHKARVLAXAMSQVTNPTTIMMQRGNLRNQRKTVKCFNCGKEGHIAKNCRAPRKKGCWKCGKKGHQLKDCTERQANFLGKIWPSHKGRPGNFLQXRPEPTAPPEESFRFGEETTTXPQKQEPIDKELYPLASLRSLFGNDPSSQ

SEQ ID NO: 556 - protein, 489 aa, Human immunodeficiency virus
  misc_feature (446)..(446): Xaa can be any naturally occurring amino acid
MGARASILSGGKLDKWEKIRLRPGGRKKYQLKHLVWASRELERFAVNPGLLETAEGCKQILQQLQPSLRTGSEELRSLYNAVATLYCVHQGIEVKDTKEALDKVEEEQNESKKQTQQAAAGTGNNSQVSQNYPIVQNLQGQMVHQALSPRTLNAWVKVIEEKAFSPEVIPMFTALSEGATPQDLNTMLNTVGGHQAAMQMLKDTINEEAAEWDRLHPVHAGPNAPGQLREPRGSDIAGTTSTLQEQIAWMTHNPPIPVGDIYKRWIILGLNKIVRMYSPVSILDIRQGPKEPFRDYVDRFYKTLRAEQASQDVKNWMTETLLVQNANPDCRTILKALGPAATLEEMMTACQGVGGPGHKARVLAEAMSQVTNSATVMMQKGNLGNQRKFVKCFNCGKAGHISRNCRAPRKKGCWKCGKEGHQMKDCTERQANFLGNFPQSRTEPTXPPEESFRFGEETTPSQKQEKTDKEELYPLASLRSLFGNDPSSQ

SEQ ID NO: 557 - protein, 512 aa, Human immunodeficiency virus
  misc_feature (46)..(46): Xaa can be any naturally occurring amino acid
  misc_feature (74)..(74): Xaa can be any naturally occurring amino acid
  misc_feature (90)..(90): Xaa can be any naturally occurring amino acid
  misc_feature (93)..(93): Xaa can be any naturally occurring amino acid
  misc_feature (109)..(109): Xaa can be any naturally occurring amino acid
  misc_feature (124)..(124): Xaa can be any naturally occurring amino acid
  misc_feature (127)..(127): Xaa can be any naturally occurring amino acid
  misc_feature (168)..(168): Xaa can be any naturally occurring amino acid
  misc_feature (179)..(179): Xaa can be any naturally occurring amino acid
  misc_feature (201)..(201): Xaa can be any naturally occurring amino acid
  misc_feature (264)..(264): Xaa can be any naturally occurring amino acid
  misc_feature (273)..(273): Xaa can be any naturally occurring amino acid
  misc_feature (284)..(284): Xaa can be any naturally occurring amino acid
  misc_feature (392)..(392): Xaa can be any naturally occurring amino acid
  misc_feature (466)..(466): Xaa can be any naturally occurring amino acid
  misc_feature (490)..(490): Xaa can be any naturally occurring amino acid
MGARASVLSGGELDRWEKIRLRPGGKKKYRLKHIVWASRELERFAXNPGLLETSGGCRQILIQLQPSLQTGSEXLKSLYNTVATLYCVHXKIXVRDTKEALEKVEEEQXKSKKKAQQAAADTGXNSXNSSQVSQNYPIVQNMQGQMVHQAISPRTLNAWVKVVEEKAXSPEVIPMFSAXSEGATPQDLNTMLNTVGGHQAXMQMLKETINEEAAEWDRLHPVHAGPIAPGQMREPRGSDIAGTTSTLQEQIGWMTHNPPIPVGXIYKRWIILXLNKIVRMYSPXSILDIRQGPKEPFRDYVDRFYKTLRAEQASQEVKNWMTETLLVQNANPDCKTILKALGPAATLEEMMTACQGVGGPGHKARVLAEAMSQATNSAAIMMQRGNFRNQRXTIKCFNCGKEGHLARNCRAPRKKGCWKCGKEGHQMKDCTERQANFLGKIWPSHKGRPGNFLQSRPEPTAPPRPXPTAPPEESFRFGEETATPAQKQEXKDKELYPLASLRSLFGSDPSLQ

SEQ ID NO: 558 - protein, 501 aa, Human immunodeficiency virus
  misc_feature (11)..(11): Xaa can be any naturally occurring amino acid
  misc_feature (164)..(164): Xaa can be any naturally occurring amino acid
  misc_feature (183)..(183): Xaa can be any naturally occurring amino acid
  misc_feature (195)..(195): Xaa can be any naturally occurring amino acid
  misc_feature (459)..(459): Xaa can be any naturally occurring amino acid
  misc_feature (475)..(475): Xaa can be any naturally occurring amino acid
  misc_feature (493)..(493): Xaa can be any naturally occurring amino acid
MGARASILSGXKLDAWEKIRLRPGGKKQYQLKHIVWASRELERFAVNPGLLETSEGCRQILQQLQPSLQTGSEELKSLYNTIAVLYCVHQRIDVKDTKEALDKIEEEQNKSKKQAQQAAANTGNSSQVSQNYPIVQNLQGQMVHQSLSPRTLNAWVKVIEEKAXSPEVIPMFTALSEGATPQXLNTMLNTVGGHXAAMQMLKETINEEAAEWDRLHPVHAGPVAPGQMREPRGSDIAGTTSTLQEQIGWMTSNPAIPVGEIYKRWIILGLNKIVRMYSPISILDIKQGPKEPFRDYVDRFYKTLRAEQASQDVKNWMTETLLVQNSNPDCKTILKALGPGATLEEMMTACQGVGGPSHKARILAEAMSQVNSTAVMMQRGNFRNQRKTVKCFNCGKEGHIARNCRAPRKKGCWRCGKEGHQMKDCTERQANFLGKFWPSHKGRPGNFLQSRPEPSAPPXESFRFGEETTTPPQKXELIDLDKELYPSASLKSXFGNDPSSK

SEQ ID NO: 559 - protein, 504 aa, Human immunodeficiency virus
  misc_feature (247)..(247): Xaa can be any naturally occurring amino acid
  misc_feature (249)..(249): Xaa can be any naturally occurring amino acid
  misc_feature (287)..(287): Xaa can be any naturally occurring amino acid
  misc_feature (407)..(407): Xaa can be any naturally occurring amino acid
  misc_feature (456)..(456): Xaa can be any naturally occurring amino acid
  misc_feature (477)..(477): Xaa can be any naturally occurring amino acid
  misc_feature (489)..(489): Xaa can be any naturally occurring amino acid
  misc_feature (501)..(501): Xaa can be any naturally occurring amino acid
MGARASVISGGELDRWEKIRLRPGGHKKYRLKHIVWASRELERFAVNPGLLETGAGCRQILEQLQPSLQTGSEELKSLYNTIAVLYCVHQRIDVKDTKEALDKIEEEQNKSKKKVQQAAAATAADTGSNSQVSQNYPIVQNLQGQMVHQAISPRTLNAWVKVVEEKAFSPEVIPMFSALSEGATPQDLNTMLNTVGGHQAAMQMLKETINEEAAEWDRLHPVHAGPIAPGQMREPRGSDIAGTTSTXQXQIGWMTNNPPIPVGEIYKRWIILGLNKIVRMYSPTSIXDIRQGPKEPFRDYVDRFYKTLRAEQASQEVKNWMTETLLVQNANPDCKTILKALGPAATLEEMMTACQGVGGPGHKARILAEAMSQVTNPATIMMQRGNFRGQGRPVKCFNCGKEGHIAXNCKAPRKKGCWKCGKEGHQMKDCNERQANFLGKIWPSSKGRPGNFLQSXPEPTAPPMESFKFGEETTTPXQKQEPTDKEMYXLASLKSLFGNDXSSQ

SEQ ID NO: 560 - protein, 498 aa, Human immunodeficiency virus
  misc_feature (17)..(17): Xaa can be any naturally occurring amino acid
  misc_feature (62)..(62): Xaa can be any naturally occurring amino acid
  misc_feature (104)..(104): Xaa can be any naturally occurring amino acid
  misc_feature (138)..(138): Xaa can be any naturally occurring amino acid
  misc_feature (143)..(143): Xaa can be any naturally occurring amino acid
  misc_feature (173)..(173): Xaa can be any naturally occurring amino acid
  misc_feature (240)..(240): Xaa can be any naturally occurring amino acid
  misc_feature (258)..(258): Xaa can be any naturally occurring amino acid
  misc_feature (277)..(277): Xaa can be any naturally occurring amino acid
  misc_feature (285)..(285): Xaa can be any naturally occurring amino acid
  misc_feature (307)..(307): Xaa can be any naturally occurring amino acid
  misc_feature (326)..(326): Xaa can be any naturally occurring amino acid
  misc_feature (387)..(387): Xaa can be any naturally occurring amino acid
  misc_feature (430)..(430): Xaa can be any naturally occurring amino acid
  misc_feature (463)..(463): Xaa can be any naturally occurring amino acid
  misc_feature (474)..(474): Xaa can be any naturally occurring amino acid
MGARASVLSGGDLDRWXKIRLRPGGKKRYQLKHIVWASRELERFAVNPGLLETAEGCRQILXQLQPSLQTGSEELKSLYNAVATLYCVHQKIDVKDTKEALDIXEEEQNKGKKKAQQAAADTGNSGQVSQNYPIVQNXQGQMXHQAIAPRTLNAWVKVVEEKAFSPEVIPMFXALSEGATPQDLNTMLNTVGGHQAAMQMLKETINEEAAEWDRLHPVQAGPVAPGQMREPRGSDIAGTXSTLQEQIGWMTSNPPIPXGEIYKRWIVMGLNKIVRMXSPTSILDXRQGPKEPFRDYVDRFYKTLRAXQASQDVKNWMTETLLVQNXNPDCKTILKALGPGATLEEMMTACQGVGGPGHKARVLAEAMSQVNPNAIMMQRGNFRNQRXTVKCFNCGKEGHIAKNCRAPRKKGCWKCGQEGHQMKDCTERQXNFLGKIWPSHKGRPGNFPQSRTEPTAPPEESFXFGEETTPPQKXGQKDKELYPLTSLRSLFGNDPSSQ

SEQ ID NO: 561 - protein, 503 aa, Human immunodeficiency virus
  misc_feature (114)..(114): Xaa can be any naturally occurring amino acid
  misc_feature (202)..(202): Xaa can be any naturally occurring amino acid
  misc_feature (326)..(326): Xaa can be any naturally occurring amino acid
  misc_feature (351)..(351): Xaa can be any naturally occurring amino acid
  misc_feature (503)..(503): Xaa can be any naturally occurring amino acid
MGARASVLRGGDLDRWEKIRLRPGGKKTYQLKHIVWASRELERFAVNPGLLETAEGCRLILGQLQPSLQTGSEELRSLYNTIAVLYCVHQKIDVKDTKEALDKIEEEQNKSKKXAQQAQQTEAATGNNSQVSQNYPIVQNLQGQMVHQALSPRTLNAWVKVVEEKAFSPEVIPMFSALSEGATPQDLNTMLNTVGGHQAAMXMLKETINEEAAEWDRMHPVHAGPIAPGQMREPRGSDIAGTTSTLQEQIGWMTNNPPIPVGEIYKRWIILGLNKIVRMYSPVSILDIRQGPKEPFRDYVDRFYKTLRAEQATQDVKNWMTETLLXQNANPDCKTILKAMGPGVTLEEMMXACQGVGGPGHKARVLAEAMSQVTNSTNIMMQRGNFRKTVKCFNCGKQGHIARNCRAPRKKGCWKCGKEGHQMKDCTERQANFLGKIWPSHKGRPGNFLQSRPEPTVPTAPPAESFRFGEETTTPPQKQEQIDKDPSPLASLRSLFGNDPSSX

SEQ ID NO: 562 - protein, 506 aa, Human immunodeficiency virus
  misc_feature (177)..(177): Xaa can be any naturally occurring amino acid
  misc_feature (389)..(389): Xaa can be any naturally occurring amino acid
  misc_feature (392)..(392): Xaa can be any naturally occurring amino acid
  misc_feature (395)..(395): Xaa can be any naturally occurring amino acid
  misc_feature (405)..(405): Xaa can be any naturally occurring amino acid
  misc_feature (416)..(416): Xaa can be any naturally occurring amino acid
MGARASVLSGGKLDKWERIRLRPGGKKKYRLKHIVWASRELERFAVNPGLLETSEGCRQILGQLYPALNTGSEELRSLYNTVATLYCVHKEIEVKDTKEALDKIEEEQNTNKKKEQQAAADTGNRSQVSQNYPIVQNLQGQMVHQALSPRTLNAWVKVIEEKAFSPEVIPMFTALSXGATPQDLNTMLNTVGGHQAAMQMLKETINEEAAEWDRLHPVPAGPVAPGQMREPRGSDIAGTTSTLQEQIGWMTNNPPIPVGEIYKRWIILGLNKIVRMYSPTSILDIRQGPKEPFRDYVDRFYKTLRAEQASQDVKNWMTETLLVQNANPDCKTILRALGPAATLEEMMIACQGVGGPGHKARVLAEAMSQVTNSATVMMQRGNFRDPRKXVKXFNXGKTGHIAKNXRAPRKKGCWKXGKEGHQMKDCNERQANFLGRVWPFHKERPGNFLQSRPAPTAPTEPTAPPEESFRFGEGTATPPQKQEPIDKDLYPLASLKSLFGNDPLSQ

SEQ ID NO: 563 - protein, 504 aa, Human immunodeficiency virus
  misc_feature (46)..(46): Xaa can be any naturally occurring amino acid
  misc_feature (62)..(62): Xaa can be any naturally occurring amino acid
  misc_feature (211)..(211): Xaa can be any naturally occurring amino acid
  misc_feature (410)..(410): Xaa can be any naturally occurring amino acid
  misc_feature (482)..(482): Xaa can be any naturally occurring amino acid
MGARASVLSGGELDRWEKIRLRPGGKKQYKLKHIVWASRELERFAXNPGLLETSEGCRQILXQLQPSLQTGSEELKSLFNTVATLYCVHQRIPVKDTKEALDKVEEEQNKSKKKAQQQAAAGTGNSSQVSQVSQNYPIVQNLQGQMVHQALSPRTLNAWVKVVEEKAFSPEVIPMFSALSEGATPQDLNTMLNTVGGHQAAMQMLKETINXEAAEWDRLHPVQAGPVAPGQIREPRGSDIAGTTSTLQEQIAWMTHNPPIPVGEIYKRWIILGLNKIVRMYSPTSILDIRQGPKEPFRDYVDRFYKTLRAEQASQEVKNWMTETLLVQNANPDCKTILKALGPGATLEEMMTACQGVGGPGHKARVLAEAMSQVTNAGNIMMQRGNFKNQRKTIKCFNCGKEGHLARNCXAPRKKGCWKCGKEGHQMKDCTERQANFLGKIWPSHKGRPGNFLQSRPEPSAPPEESFRFGEETTTPSQKQEXIDKEVYPLTSLKSLFGNDPSSQ

SEQ ID NO: 564 - protein, 499 aa, Human immunodeficiency virus
  misc_feature (227)..(227): Xaa can be any naturally occurring amino acid
  misc_feature (307)..(307): Xaa can be any naturally occurring amino acid
  misc_feature (460)..(460): Xaa can be any naturally occurring amino acid
MGARASVLSGGDLDRWEKIQLRPGGKKKYKLKHIVWASRELERFAVNPGLLETSEGCRKILEQLQPALRTGSEELRSLYNTVATLYCVHQKIEVKDTKEALDKIEEEQNKSKKNAQQAAADTGNRSQVSQNYPIVQNLQGQMVHQAISPRTLNAWVKVVEEKAFSPEVIPMFSALSEGATPQDLNTMLNTVGGHQAAMQMLKETINEEAAEWDRLHPVQAGPVAPGXMREPRGSDIAGTTSNLQEQIGWMTSNPPIPVGEIYKRWIILGLNKIVRMYSPTSILDIRQGPKEPFRDYVDRFYKTLRAXQASQDVKNWMTETLLVQNANPDCKTILKALGPAATLEEMMTACQGVGGPGHKARVLAEAMSQVTNSATIMMQRGSFRNQRRIVKCFNCGKEGHIAKNCRAPRKKGCWKCGKEGHQMKDCTERQANFLGKIWPSHKGRPGNFLQSRPEPTAPPXESFRFGKETTPPQKQESIDKELYPLASLKSLFGNDPSSQ

SEQ ID NO: 565 - protein, 500 aa, Human immunodeficiency virus
  misc_feature (120)..(120): Xaa can be any naturally occurring amino acid
  misc_feature (384)..(384): Xaa can be any naturally occurring amino acid
  misc_feature (458)..(458): Xaa can be any naturally occurring amino acid
MGARASVLSGGELDRWEKIRLRPGGKKQYKLKHIVWASRELERFAVNPGLLETAEGCKQILGQLQPALPTGSEEIKSLYNTVATLYCVHQKIDVKDTKEALDRIEEEQNKCKKKAQQAAXDAEKSNQVSQNYPIVQNIQGQPVHQAISPRTLNAWVKVVEEKAFSPEVIPMFSALSEGATPQDLNTMLNTVGGHQAAMQMLKETINEEAAEWDRLHPAQAGPVAPGQMREPRGSDIAGTTSTLQEQIGWMTSNPPIPVGEIYKRWIILGLNKIVRMYSPSSILDIKQGPKEPFRDYVDRFYKTLRAEQASQEVKNWMTETLLVQNSNPDCKTILKALGPAATLEEMMTACQGVGGPGHKARVLAEAMSQVTNSATVMMQRGNFXNQKKTVKCFNCGKEGHLAKNCRAPRKRGCWKCGKEGHQMKDCTERQANFLGKIWPSHRGRPGNFLQSRPEPSAXPEESFRFGEETTAPSQKQEPIDKDLYPLASLRSLFGNDPSSQ

SEQ ID NO: 566 - protein, 508 aa, Human immunodeficiency virus
  misc_feature (27)..(27): Xaa can be any naturally occurring amino acid
  misc_feature (41)..(41): Xaa can be any naturally occurring amino acid
  misc_feature (89)..(89): Xaa can be any naturally occurring amino acid
  misc_feature (98)..(98): Xaa can be any naturally occurring amino acid
  misc_feature (102)..(102): Xaa can be any naturally occurring amino acid
  misc_feature (128)..(128): Xaa can be any naturally occurring amino acid
  misc_feature (178)..(178): Xaa can be any naturally occurring amino acid
  misc_feature (410)..(410): Xaa can be any naturally occurring amino acid
  misc_feature (483)..(483): Xaa can be any naturally occurring amino acid
MGARASVLSGGKLDRWEKIRLRPGGKXRYKLKHIVWASREXERFAVNPGLLETSEGCRQILGQLQPALQTGSEELKSLYNTVATLYCVXQGIEVKDTXEALXKIEEEQNKSKKKAQQAAADTGSCSQXSQNYPIVQNIQGQMVHQALSPRTLNAWVKVIEEKAFSPEVIPMFSALSEXATPQDLNTMLNTVGGHQAAMQMLKETINEEAAEWDRLHPAQAGPVAPGQMRDPRGSDIAGTTSTLQEQIGWMTSNPPIPVGEIYKRWIILGLNKIVRMYSPVSILDIRQGPKEPFRDYVDRFYKTLRAEQASQEVKNWMTETLLVQNANPDCKTILKALGPAATLEEMMTACQGVGGPGHKARVLAEAMSQATNSATMMMQRGNFKNPGKNIKCFNCGKQGHTAKNCRAPRXKGCWKCGKEGHQMKDCTERQANFLGKIWPAHKGRPGNFLQSRPDPTAPSRTEPTAPPEESFKCREEITTPPQXQEPIDQGQYPLTSLRSLFGNDPSSQ

SEQ ID NO: 567 - protein, 500 aa, Human immunodeficiency virus
MGARASVLSGGELDRWEKIRLRPGGKKQYRLKHIVWASRELERFAVNPGLLETSEGCRQILSQLQPSLQTGSEELRSLYNTIATLYCVHQKIEVRDTKEALDKIEEEQNKSKKKAQPAAAATGNSSQDSQNYPIVQNLQGQMVHQPISARTLNAWVKVVEEKAFSPEVIPMFSALSEGATPQDLNTMLNTVGGHQAAMQMLKETINEEAAEWDRLHPVHAGPIAPGQMREPRGSDIAGTTSTLQEQIGWMTNNPPIPVGDIYKRWIILGLNKIVRMYSPVSILDIRQGPKEPFRDYVDRFYKVLRAEQASQDVKNWMTETLLVQNANPDCKTILKALGPAATLEEMMTACQGVGGPGHKARVLAEAMSQVTNSATVMMQKGNFRNQRKTIKCFNCGKEGHLARNCRAPRKKGCWKCGREGHQMKDCTERQANFLGKLWPSQQGRPGNFLQSRPEPSAPPAESFRFGEETTTPSQKQGPIDEGKYPLASLRSLFGNDPSSQ

SEQ ID NO: 568 - protein, 502 aa, Human immunodeficiency virus
  misc_feature (16)..(16): Xaa can be any naturally occurring amino acid
MGARASVLSGGKLDQXEKIRLRPGGKKKYKLKHIVWASRELERFALNPGLLETPEGCRQILGQIQPSLNTGTEELRSLYNTVAVLYCVHQRINVKDTKEALDKIEEEQNKSKQKTQQAAADTGSSSSSQVSQNYPIVQNLQGQMVHQALSPRTLNAWVKVIEEKAFSPEVIPMFTALSEGATPQDLNTMLNTVGGHQAAMQMLKETINEEAAEWDRLHPMQAGPVAPGQIRDPRGSDIAGTTSTLQEQIAWMTSNPPVPVGEIYKRWIILGLNKIVRMYSPVSILDIRQGPKEPFRDYVDRFYKTLRAEQASQDVKNWMTETLLVQNANPDCKTILKALGPAASLEEMMTACQGVGGPGHKARVLAEAMSQVTTPPTIMMQRGNFRNQRRTIKCFNCGREGHVAKNCRAPRKKGCWKCGKEGHQMKDCTERQANFLGKIWPSHKGRPGNFLQSRPEPTAPPAESFRSGEETAIPSQKQDQIDKELYPLASLRSLFGNDPSSQ

SEQ ID NO: 569 - protein, 500 aa, Human immunodeficiency virus
  misc_feature (12)..(12): Xaa can be any naturally occurring amino acid
  misc_feature (82)..(82): Xaa can be any naturally occurring amino acid
  misc_feature (91)..(91): Xaa can be any naturally occurring amino acid
  misc_feature (97)..(97): Xaa can be any naturally occurring amino acid
  misc_feature (382)..(382): Xaa can be any naturally occurring amino acid
  misc_feature (482)..(483): Xaa can be any naturally occurring amino acid
MGARASVLSGGXLDKWEKIRLRPGGKKKYKLKHIVWASRELERFAVNPGLMETAEGCKQILGQLQPSLQTGSEELKSLFNTXAVLYCVHQXIDVKDXKEALEKIEEEQTKSKKKVQQVAADTGNSSQVSQNYPIVQNMQGQMVHQAISPRTLNAWVKVIEEKAFSPEVIPMFAALSEGATPQDLNTMLNTVGGHQAAMQMLKETINEEAAEWDRLHPVHAGPIAPGQMREPRGSDIAGTTSTLQEQIGWMTNNPPIQVGEIYKRWIILGLNKIVRMYSPVSILDIRQGPKEPFRDYVDRFYKTLRAEQASQEVKNWMTETLLVQNANPDCKTILKALGPAATLEEMMTACQGVGGPSHKARVLAEAMSQATNSATIMMQRGXFRNQRKIVKCFNCGKEGHIAKNCKAPRRKGCWKCGKEGHQMRDCTERQANFLGKIWPSHKGRPGNFLQSRPEPTAPPAESFGFGEETTTPSQKQEPTDKXXYPLASLRSLFGNDPLSQ

SEQ ID NO: 570 - protein, 498 aa, Human immunodeficiency virus
MGARASVLSGGELDKWEKIRLRPGGKKAYKLKHIVWASRELERFALNPGLLESAEGCRQILGQLQPSLRTGSEELRSLYNTVATLYCVHQKIAVKDTKEALDKVEEEQNKSKKKEAAADTGNSSQVSQNLPIVQNLQGQMVHQALSPRTLNAWVKVIEEKAFSPEVIPMFSALSEGATPQDLNTMLNTVGGHQAAMQMLKETINEEAAEWDRLHPVHAGPIAPGQMREPRGSDIAGTTSTLQEQIAWMTNNPAIPVGEIYKRWIILGLNKIVRMYSPVSILDIRQGPKEPFRDYVDRFYKTLRAEQATQEVKNWMTETLLVQNANPDCKTILKALGPGATLEDMMTACQGVGGPGHKARVLAEAMSQVTNSSAIMMQRGNFRNQRKTVKCFNCGKEGHIAKNCRAPRKKGCWKCGKEGHQMKDCTERQANFLGRIWPSHKGRPGNFLQSRPEPSAPPEESFRFGEETATPSQKQEPIDKELYPLTSLKSLFGNDPLSQ

SEQ ID NO: 571 - protein, 499 aa, Human immunodeficiency virus
  misc_feature (437)..(437): Xaa can be any naturally occurring amino acid
  misc_feature (446)..(446): Xaa can be any naturally occurring amino acid
MGARASILSGGKLDKWEKIRLRPGGKKQYKLKHLVWASRELERFAVNPGLLETSEGCRQILGQLQPSLQTGSEELKSLYNTIAVLYCVHQRIDINDTKEALDKIEEEQNKSKKKAQQAAADTGNSSQVSQNYPIVQNLQGQMVHQAISPRTLNAWVKVVEEKAFSPEVIPMFSALSEGATPQDLNTMLNTVGGHQAAMQMLKETINEEAADWDRLHPVHAGPIAPGQMREPRGSDIAGTTSTLQEQIGWMTNNPPIPVGEIYKRWIIMGLNKIVRMYSPTSILDIRQGPKEPFRDYVDRFYKTLRAEQASQEVKNWMTETLLVQNANPDCKTILKALGPAATLEEMMTACQGVGGPGHKARVLAEAMSQANTASMMMQRSNFKNQGKTVKCFNCGKVGHIARNCRAPRKRGCWKCGKEGHQMKDCTERQANFLGKIXPSHKGRPGXFLQSRPEPTAPPEESFRFGEEATAPHQKQEPIDKELYPLASLKSLFGNDPSSQ

SEQ ID NO: 572 - protein, 504 aa, Human immunodeficiency virus
  misc_feature (79)..(79): Xaa can be any naturally occurring amino acid
  misc_feature (97)..(97): Xaa can be any naturally occurring amino acid
  misc_feature (103)..(103): Xaa can be any naturally occurring amino acid
  misc_feature (114)..(114): Xaa can be any naturally occurring amino acid
  misc_feature (166)..(166): Xaa can be any naturally occurring amino acid
  misc_feature (397)..(397): Xaa can be any naturally occurring amino acid
  misc_feature (467)..(467): Xaa can be any naturally occurring amino acid
  misc_feature (477)..(477): Xaa can be any naturally occurring amino acid
  misc_feature (504)..(504): Xaa can be any naturally occurring amino acid
MGARASVLSAGELDKWEKIRLRPGGKKQYRLKHVVWASRELERFAVNPGLLETSEGCRQILGQLQPSLQTGSEELRSLXNTVAVLYCVHQKIDVKDXKEALDXVEEEQNQSKKXAQQAAAGTGNSNQASQNYPIVQNLQGQMVHQAISPRTLNAWVKVVEEKAFSXEVIPMFSALSEGATPQDLNTMLNTVGGHQAAMQMLKETINEEAAEWDRLHPVHAGPIAPGQMREPRGSDIAGTTSTLQEQIGWMTNNPPIPVGEIYKRWIILGLNKIVRMYSPTSILDIKQGPKEPFRDYVDRFYKTLRAEQATQEVKNWMTETLLVQNANPDCKTILKALGPAATLEEMMTACQGVGGPGHKARVLAEAMSQVTNTTAMMMQRGNFRNQRRTVKCFNCGXEGHIARNCRAPRKKGCWKCGKEGHQMKDCTNERQANFLGKIWPSHKGRPGNFPQSRTEPQSRLEPTAPPXESFRFGEEAXAPSQKQEPIDKDLYPLASLKSLFGNDX

SEQ ID NO: 573 - protein, 498 aa, Human immunodeficiency virus
  misc_feature (3)..(3): Xaa can be any naturally occurring amino acid
  misc_feature (15)..(15): Xaa can be any naturally occurring amino acid
  misc_feature (81)..(81): Xaa can be any naturally occurring amino acid
  misc_feature (114)..(114): Xaa can be any naturally occurring amino acid
  misc_feature (193)..(193): Xaa can be any naturally occurring amino acid
  misc_feature (280)..(280): Xaa can be any naturally occurring amino acid
  misc_feature (304)..(304): Xaa can be any naturally occurring amino acid
  misc_feature (334)..(334): Xaa can be any naturally occurring amino acid
  misc_feature (485)..(485): Xaa can be any naturally occurring amino acid
MGXRASVLSGGELDXWEKIRLRPGGKKKYKLKHIVWASRELERFAVNPGLLETAEGCRQILGQLQPALQTGSEELKSLFNXVAVLFCVHRRIDVKDTKEALEKIEEEQNKSKKXAQQAAADTGNNSQVSQNYPIVQNMQGQMVHQAISPRTLNAWVKVVEEKAFSPEVIPMFSALSEGATPQDLNTMLNTVGXHQAAMQMLKETINEEAAEWDRLHPVHAGPIAPGQMREPRGSDIAGTTSTLQEQIGWMTNNPPIPVGEIYKRWIILGLNKIVRMYSPXSILDIKQGPKEPFRDYVDRFYKVXRAEQASQEVKNWMTETLLVQNANPDCKTIXKALGPAATLEEMMTACQGVGGPGHKARVLAEAMSQVTNSATIMMQKGNFKNQRKMVKCFNCGREGHIAKNCRAPRKKGCWKCGKEGHQMKDCTERQANFLGKIWPSHKGRPGNFLQSRPEPTAPPEESFREETTTPSQKPELIEKEKYPLXSLRSLFGNDPSSQ

SEQ ID NO: 574 - protein, 513 aa, Human immunodeficiency virus
  misc_feature (15)..(15): Xaa can be any naturally occurring amino acid
  misc_feature (47)..(47): Xaa can be any naturally occurring amino acid
  misc_feature (103)..(103): Xaa can be any naturally occurring amino acid
  misc_feature (172)..(172): Xaa can be any naturally occurring amino acid
  misc_feature (376)..(376): Xaa can be any naturally occurring amino acid
  misc_feature (380)..(380): Xaa can be any naturally occurring amino acid
  misc_feature (392)..(392): Xaa can be any naturally occurring amino acid
MGARASVLSGGKLDXWEKIRLRPGGKKKYKLKHIVWASRELERFAVXPGLLETSEGCRQILGQLQPSLQTGSEELKSLYNTIAVLYCVHQRIEIKDTKEALDXIEEERNKSKKQAQQQQTQQAAADTGNSSKVSQNYPIVQNMQGQMVHQAISPRTLNAWVKVVEEKAFSPXVIPMFAALSEGATPQDLNTMLNTVGGHQAAMQMLKETINEEAAEWDRLHPVPAGPVAPGQMRDPRGSDIAGTTSTLQEQIGWMTSNPPIQVGEIYKRWIILGLNKIVRMYSPTSILDIKQGPKEPFRDYVDRFYKTLRAEQASQEVKNWMTETLLVQNANPDCKTILKALGPAATLEEMMTACQGVGGPSHKARVLAEAMSQAXSAAXMMQRGNFRNQRXIVKCFNCGKEGHIARNCKAPRKKGCWKCGKEGHQMKDCNNERQANFLGKIWPSHKGRPGNFLQNRPEPTAPSRPEPTAPPEESFRFGEEIATPSQKQEPIDKGLYPLASLRSLFGNDPLSQ

SEQ ID NO: 575 - protein, 500 aa, Human immunodeficiency virus
  misc_feature (40)..(40): Xaa can be any naturally occurring amino acid
  misc_feature (68)..(68): Xaa can be any naturally occurring amino acid
  misc_feature (77)..(77): Xaa can be any naturally occurring amino acid
  misc_feature (357)..(357): Xaa can be any naturally occurring amino acid
  misc_feature (370)..(370): Xaa can be any naturally occurring amino acid
  misc_feature (374)..(374): Xaa can be any naturally occurring amino acid
  misc_feature (392)..(392): Xaa can be any naturally occurring amino acid
  misc_feature (402)..(402): Xaa can be any naturally occurring amino acid
  misc_feature (421)..(421): Xaa can be any naturally occurring amino acid
  misc_feature (471)..(471): Xaa can be any naturally occurring amino acid
MGARASVLSGGKLDKWERIRLRPGGKKKYKLKHIVWASRXLERFALNPGLLETSEGCRQILGQIQPSXQTGSEEIKXLYNTVATLYCVHQNIEIRDTKEALEKIEEEQNKSKKKAQQAAADTGSSKQVSQNYPIVQNIQGQMVHQAISPRTLNAWVKVVEEKAFSPEVIPMFSALSEGATPQDLNTMLNTVGGHQAAMQMLKETINEEAAEWDRVHPVQAGPIAPGQIREPRGSDIAGTTSTLQEQITWMTNNPPIPVGEIYKRWIILGLNKIVRMYSPTSILDIRQGPKEPFRDYVDRFYKTLRAEQASQEVKNWMTETLLVQNANPDCKTILKALGPAATLEEMMTACQGVGGPXHKARVLAEAMSQXTNPXNIMMQRGNFKNQRKAVKXFNCGKEGHIXKNCRAPRKRGCWKCGKEGXQMKDCTERQANFLGKIWPSHKGRPGNFLQNRPEPTAPPEESFRFGEEATXPSQKQESIDKDLYPLASLKSLFGNDPSSQ

SEQ ID NO: 576 - protein, 504 aa, Human immunodeficiency virus
  misc_feature (26)..(26): Xaa can be any naturally occurring amino acid
  misc_feature (28)..(28): Xaa can be any naturally occurring amino acid
  misc_feature (43)..(43): Xaa can be any naturally occurring amino acid
  misc_feature (54)..(54): Xaa can be any naturally occurring amino acid
  misc_feature (63)..(63): Xaa can be any naturally occurring amino acid
  misc_feature (114)..(114): Xaa can be any naturally occurring amino acid
  misc_feature (138)..(138): Xaa can be any naturally occurring amino acid
  misc_feature (164)..(164): Xaa can be any naturally occurring amino acid
  misc_feature (309)..(309): Xaa can be any naturally occurring amino acid
  misc_feature (329)..(329): Xaa can be any naturally occurring amino acid
  misc_feature (367)..(367): Xaa can be any naturally occurring amino acid
  misc_feature (430)..(430): Xaa can be any naturally occurring amino acid
  misc_feature (452)..(452): Xaa can be any naturally occurring amino acid
  misc_feature (454)..(454): Xaa can be any naturally occurring amino acid
  misc_feature (456)..(456): Xaa can be any naturally occurring amino acid
MGARASILSGGKLDAWEKIRLRPGGXKXYQLKHLVWASRELEXFAVNPGLLETXEGCRQILGXLQPSLQTGSEELKSLFNTVAVLYCVHQRIEIKDTKEALDKIEEEQNKSKKXAQQAAAAAADTGNSSQVSQNFPIXQNMQGQMVHQPLTPRTLNAWVKVVEXKAFSPEVIPMFSALSEGATPQDLNTMLNTVGGHQAAMQMLKETINEEAAEWDRLHPVHAGPIAPGQMREPRGSDIAGTTSTLQEQIGWMTNNPPIPVGEIYKRWIILGLNKIVRMYSPTSILDIRQGPKEPFRDYVDRFYKTLRXEQASQEVKNWMTETLLVQNXNPDCKTILKALGPAATLEEMMTACQGVGGPSHKARVLXEAMSQATNSATIMMQRGNFRNQRKTVKCFNCGKEGHIARNCRAPRKKGCWKCGKEGHQMKDCXERQANFLGKIWPSHKGRPGNFXQXRXEPSAPPEESFRFGEETTTPSQKQEPTDKGMYPPLASLRSLFGNDPSSQ

SEQ ID NO: 577 - protein, 500 aa, Human immunodeficiency virus
  misc_feature (28)..(28): Xaa can be any naturally occurring amino acid
  misc_feature (304)..(304): Xaa can be any naturally occurring amino acid
  misc_feature (361)..(361): Xaa can be any naturally occurring amino acid
  misc_feature (380)..(380): Xaa can be any naturally occurring amino acid
  misc_feature (387)..(387): Xaa can be any naturally occurring amino acid
  misc_feature (389)..(389): Xaa can be any naturally occurring amino acid
  misc_feature (418)..(418): Xaa can be any naturally occurring amino acid
  misc_feature (490)..(490): Xaa can be any naturally occurring amino acid
MGARASVLSGGKLDKWEKIRLRPGGKKXYKLKHLVWASREVERFLINPGLLETAEGCRQILGQLHPALQTGSEELKSLYNTVATLYCVHQNIDVKDTKEALDKIEEEQNKSKKKAQQAAADSGSSSQVSQNYPIVQNLQGQMVHQPISPRTLNAWVKVVEEKAFSPEVIPMFTALSEGATPQDLNTMLNTVGGHQAAMQMLKETINEEAAEWDRMHPVHAGPIAPGQMREPRGSDIAGTTSNLQEQIGWMTSNPPIPVGEIYKRWIILGLNKIVRMYSPTSILDIRQGPKEPFRDYVDRFYKTXRAEQASQDVKNWMTETLLVQNANPDCKTILKALGPAATLEEMMTACQGVGGPGHKAXVLAEAMSQVTGSATVMMQXGRFRDQXRXVKCFNCGKEGHIAKNCRAPRKKGCWKCGXEGHQMKDCTERQANFLGKIWPSHKGRPGNFLQSRPEPTAPPEESFRFGEETTTPSQKQELKDQEMYPLTSLXSLFGSDPLSQ

SEQ ID NO: 578 - protein, 505 aa, Human immunodeficiency virus
MGARASILSGAELDRWEKIRLRPGGKKNYQLKHLVWASRELERFAVNPSLLETGAGCRQILGQLQPSLQTGSEELKSLFNTVATLYCVHQKIEVKDTKEALDKIEEEQNKSKKKAQQAAADAEKNSQVSQNYPIVQNLQGQMVHQPLSPRTLNAWVKVVEEKAFSPEVIPMFSALAEGATPQDLNTMLNTVGGHQAAMQMLKETINEEAAEWDRLHPVQAGPVAPGQLREPRGSDIAGTTSNLQEQIAWMTHNPPVPVGEIYKRWIILGLNKIVRMYSPISILDIKQGPKEPFRDYVDRFYKTLRAEQGTPDVKQWMTETLLVQNANPDCKSILKAMGPGATLEEMMTACQGVGGPSHKARVLAEAMSQVTNSTNIMMQRGNFKNQRKPVKCFNCGKEGHIARNCRAPRKRGCWKCGKEGHQMKDCSERQANFLGKIWPSHKGRPGNFLQNRTESTASVEPTAPPAESFMFGEETTPPQKQEPRDKELYPSTALRSLFGNDPLSQ

SEQ ID NO: 579 - protein, 500 aa, Human immunodeficiency virus
  misc_feature (61)..(61): Xaa can be any naturally occurring amino acid
  misc_feature (126)..(126): Xaa can be any naturally occurring amino acid
  misc_feature (138)..(138): Xaa can be any naturally occurring amino acid
  misc_feature (160)..(160): Xaa can be any naturally occurring amino acid
  misc_feature (162)..(162): Xaa can be any naturally occurring amino acid
  misc_feature (278)..(278): Xaa can be any naturally occurring amino acid
  misc_feature (283)..(283): Xaa can be any naturally occurring amino acid
  misc_feature (331)..(331): Xaa can be any naturally occurring amino acid
  misc_feature (391)..(391): Xaa can be any naturally occurring amino acid
  misc_feature (409)..(409): Xaa can be any naturally occurring amino acid
  misc_feature (483)..(483): Xaa can be any naturally occurring amino acid
  misc_feature (500)..(500): Xaa can be any naturally occurring amino acid
MGARASVLSGGELDRWEKIRLRPGGNKKYKLKHIVWASRELERFAVNPGLLETSDGCRQIXAQLQPSLQTGSEELKSLFNTVAVLYCVHQRIEVKDTKEALDKVEEEQNKSKKKAQPAAADTGNNXQVSQNYPIVQNXQGQMVHQSLSPRTLNAWVKVIXEXAFSPEVIPMFSALSEGATPQDLNTMLNTVGGHQAAMQMLKETINEEAAEWDRLHPVHAGPIAPGQMREPRGSDIAGTTSTLQEQIGWMTNNPPIPVGEIYKRWIILGLNKIVRMYXPVSIXDIRQGPKEPFRDYVDRFYKTLRAEQATQEVKNWMTETLLVQNANPDCXTILKALGPAATLEEMMTACQGVGGPGHKARVLAEAMSQVTSSATIMMQKGNFRNQRKIVXCFNCGKEGHIARNCRAPXKKGCWKCGKEGHQMKECTERQANFLGKIWPSHKGRPGNFLQSRPEPTAPPEESFRFGEETTTPSQKQGTTDQEXYPLVSLKSLFGNDPSSX

SEQ ID NO: 580 - protein, 508 aa, Human immunodeficiency virus
  misc_feature (388)..(388): Xaa can be any naturally occurring amino acid
  misc_feature (460)..(460): Xaa can be any naturally occurring amino acid
MGARASILSGGALDKWEKIRLRPGGKKRYQFKHIIWASRELERFALNPGLLETAEGCRQILGQLQPSLQTGTEELRSLYNTVAVLYCVHQRIDVKDTKEAIEKIEEEQNKSKKKAQQAAAAAADTGNSSTGNNSKVSQNYPIVQNLQGQMVHQPISPRTLNAWVKVVEEKAFSPEVIPMFTALSEGATPQDLNTMLNTVGGHQAAMQMLKETINEEAAEWDRLHPVQAGPVAPGQMREPRGSDIAGTTSTLQEQIGWMTSNPPIPVGEIYKRWIILGLNKIVRMYSPTSILDIRQGPKEPFRDYVDRFYKTLRAEQASQEVKNWMTETLLVQNANPDCRTILKALGPAATLEEMMTACQGVGGPGHKARVLAEAMSQVTNSNTVMMQXGNFKNQRKTVKCFNCGKEGHIARNCRAPRKRGCWKCGKEGHQMKDCTERQANFLGKIWPSHKGRPGNFLQSXPEPSAPPAESFRFGEETTTPPQKQEPMDKELYPLASLRSLFGNDPSSQ

SEQ ID NO: 581 - protein, 505 aa, Human immunodeficiency virus
  misc_feature (152)..(152): Xaa can be any naturally occurring amino acid
  misc_feature (178)..(178): Xaa can be any naturally occurring amino acid
  misc_feature (193)..(193): Xaa can be any naturally occurring amino acid
  misc_feature (223)..(223): Xaa can be any naturally occurring amino acid
  misc_feature (228)..(228): Xaa can be any naturally occurring amino acid
  misc_feature (370)..(370): Xaa can be any naturally occurring amino acid
MGARASVLSGGELDRWEKIRLRPGGKKKYQLKHIVWASRELERFAVNPGLLETSEGCRQILEQLQPSLQTGSEELKSLFNTIATLYCVHQKIDVKDTKEALEKIEEEQNRSKKKAQQAVADTGNSRQGNNSQVSQNYPIVQNMQGQMVHQPXTPRTLNAWVKVVEEKAFSPEVIPMFXALSEGATPQDLNTMXNTVGGHQAAMQMLKETINEEAAEWDRLHPXHAGPXAPGQMREPRGSDIAGTTSNLQEQIGWMTSNPPIPVGEIYKRWIILGLNKIVRMYSPTSILDIKQGPKEPFRDYVDRFYKTLRAEQASQEVKNWMTETLLVQNSNPDCKTILKALGPAATLEEMMTACQGVGGPGHKARVLAXAMSQMTNSATVMMQRGNFRNQRRTIKCFNCGKEGHIAKNCRAPRKKGCWKCGKEGHQMKDCTERQANFLGKIWPSHKGRPGNFLQSRPEPSAPPEESFRFGEETATPAQKQEPINKELYPLASLRSLFGNDHSSQ

SEQ ID NO: 582 - protein, 503 aa, Human immunodeficiency virus
  misc_feature (34)..(34): Xaa can be any naturally occurring amino acid
  misc_feature (44)..(44): Xaa can be any naturally occurring amino acid
  misc_feature (55)..(55): Xaa can be any naturally occurring amino acid
  misc_feature (82)..(82): Xaa can be any naturally occurring amino acid
  misc_feature (95)..(95): Xaa can be any naturally occurring amino acid
  misc_feature (102)..(102): Xaa can be any naturally occurring amino acid
  misc_feature (104)..(104): Xaa can be any naturally occurring amino acid
  misc_feature (163)..(163): Xaa can be any naturally occurring amino acid
  misc_feature (210)..(210): Xaa can be any naturally occurring amino acid
  misc_feature (225)..(225): Xaa can be any naturally occurring amino acid
  misc_feature (232)..(232): Xaa can be any naturally occurring amino acid
  misc_feature (242)..(242): Xaa can be any naturally occurring amino acid
  misc_feature (297)..(297): Xaa can be any naturally occurring amino acid
  misc_feature (306)..(306): Xaa can be any naturally occurring amino acid
  misc_feature (334)..(334): Xaa can be any naturally occurring amino acid
  misc_feature (374)..(374): Xaa can be any naturally occurring amino acid
  misc_feature (500)..(500): Xaa can be any naturally occurring amino acid
MGARASVLSGGELDRWEKIRLRPGGKKKYRLKHXVWASRELERXAVNPGLLETTXGCRRILEQLQPSLQTGSEELRSLFNTXATLYCVHAKIEVXDTKEALXKXEEEQNKSKKRAQQAAAAADTGNSSKVSQNYPIVQNLQGQMVHQPLSPRTLNAWVKVIEXKAFNPEVIPMFAALSEGATPQDLNTMLNTVGGHQAAMQMLKETINEXAAEWDRLHPVHAGPXAPGQMRXPRGSDIAGTXSTLQEQIGWMTNNPPIPVGEIYKKWIIMGLNKIVRMYSPVSILDIKQGPKEPFRXYVDRFYKTXRAEQATQEVKNWMTETLLVQNANPDCKXILKALGPAATLEEMMTACQGVGGPSHKARVLAEAMSQVTXPTTIMMQKGNFRSQKKTVKCFNCGREGHIAKNCRAPRKRGCWKCGKEGHQMKDCTERQANFLGKIWPSQNKGRPGNFLQSRPEPSAPPAESFRFGEETTTPPQKQEPIDKEMYPLTSLRSLFGNDXSSQ

SEQ ID NO: 583 - protein, 500 aa, Human immunodeficiency virus
  misc_feature (132)..(132): Xaa can be any naturally occurring amino acid
MGARASVLSGGELDRWEKIRLRPGGKKKYKLKHIVWASRELERFAVNPGLLETSDGCRQILGQLQPALQTGSEELKSLYNTVAVLYCVHQKIEIKDTKEALEKIEEEQNKSKKRVQQAAADTGQSSQVSQNXPIVQNLQGQMVHQPLSPRTLNAWVKVVEEKAFSPEVIPMFSALSEGATPQDLNTMLNTVGGHQAAMQMLKETINEEAADWDRLHPVHAGPIAPGQMREPRGSDIAGTTSTLQEQIGWMTNNPPIPVGEIYKRWIILGLNKIVRMYSPTSILDIRQGPKEPFRDYVDRFYKTLRAEQASQEVKNWMTETLLVQNANPDCKTILKALGPAATLEEMMTACQGVGGPGHKARVLAEAMSQATNAANIMMQKGNFRNQKKSVRCFNCGKEGHIARNCRAPRKRGCWKCGKEGHLMKDCTERQANFLGKIWPSHKGRPGNFLQSRPEPTAPPEESFRFGEKTTAPSQKQEPIDKEMYPLASLRSLFGNDPSSQ

SEQ ID NO: 584 - protein, 500 aa, Human immunodeficiency virus
MGARASVLSGGELDRWEKIRLRPGGKKQYRLKHIVWASRELERFAVNPGLLETAGGCRQILEQLQPSLQTGSEELRSLYNTVATLYCVHQKIDVRDTKEALDKIEEEQNKSKKKAQQAAADTGSCSQASQNYPIVQNLQGQMVHQAISPRTLNAWVKVVEEKAFSPEVIPMFAALSEGATPQDLNTMLNTVGGHQAAMQMLKETINEEAAEWDRLHPVHAGPIAPGQMREPRGSDIAGTTSTLQEQIGWMTSNPPTPVGEIYKRWIILGLNKIVRMYSPTSILDIRQGPKEPFRDYVDRFYKTLRAEQASQEVKNWMTETLLVQNANPDCKTILKALGPAATLEEMMTACQGVGGPGHKARVLAEAMSQVTNSATIMMQKGNFRNQRKSVKCFNCGKEGHIARNCRAPRKKGCWKCGKEGHQMKDCTERQANFLGKIWPSHKGRPGNFLQSRPEPTAPPAPPEESFRFGEETTTPSQRQEMTDKEKYPLASLRSLFGNDP

SEQ ID NO: 585 - protein, 499 aa, Human immunodeficiency virus
MGARASVLSGGELDRWEKIRLRPGGKKKYKLKHLVWASRELERFAVNPGLLETSAGCRQILGQLQPSLQTGSEELKSLYNTVATLYCVHQRIDVKDTKEALEKIEEEQNKSKKKAQQAAADTGNGSQVSQNYPIVQNIQGQMVHQPISPRTLNAWVKVVEEKAFSPEVIPMFSALAEGATPQDLNTMLNTVGGHQAAMQMLKETINEEAAEWDRVHPVQAGPIAPGQIREPRGSDIAGTTSNLQEQIAWMTNNPPIPVGEIYKRWIILGLNKIVRMYSPTSILDIRQGPKEPFRDYVDRFYKTLRAEQASQEVKNWMTETLLVQNANPDCKTILKALGPAATLEEMMTACQGVGGPGHKARVLAEAMSQVTNPVNIMMQRGNFRNQRKTVKCFNCGKEGHIAKNCRAPRKRGCWKCGKEGHQMKDCTERQANFLGKIWPSHKGRPGNFLQSRPEPTAPPEESFRFGEETATSQKQDPIDKEMYPLTSLRSLFGNDPSSQ

SEQ ID NO: 586 - protein, 502 aa, Human immunodeficiency virus
MGARASVLSGGDLDRWEKIRLRPGGKKKYQLKHIVWASRELERFAVNPGLLETSEGCRQILGQLQPSLQTGSEELRSLFNTVATLYCVHQKIDVKDTKEALEKIEEEQNKSKKKAQQAAAAADTGNSSQVSRNYPIVQNIQGQMVHQPLSPRTLNAWVKVVEEKNFSPEVIPMFSALSEGATPQDLNTMLNTIGGHQAAMQMLKETINEEAAEWDRLHPAQAGPIAPGQIREPRGSDIAGTTSNLQEQITWMTNNPPIPVGEIYKRWIILGLNKIVRMYSPTSILDIKQGPKEPFRDYVDRFYKTLRAEQASQEVKNWMTETLLVQNANPDCKTILKALGPAATLEEMMTACQGVGGPAHKARVLAEAMSQVTNSTAIMMQKGNFRNQRRSVKCFNCGKEGHIAKNCRAPRKRGCWKCGKEGHQMKDCTERQANFLGKIWPSHKGRPGNFLQSRPEPTAPPEESFRFGEETTTPSQKQDPKDKDLYPLASLRSLFGNDPSSQ

SEQ ID NO: 587 - protein, 501 aa, Human immunodeficiency virus
  misc_feature (445)..(445): Xaa can be any naturally occurring amino acid
  misc_feature (454)..(454): Xaa can be any naturally occurring amino acid
MGARASVLSGGELDRWEKIRLRPGGKKQYKLKHIVWASRELERFAVNPGLLETAEGCRQILRQLQPALQTGSEGLTSLYNTVATLYCVHSRIEVKDTKEALDKIEEEQNKSKKKAQPTVADAGNNSNQVSQNYPIVQNLQGQMVHQPMTPRTLNAWVKVVEEKAFSPEVIPMFSALAEGATPQDLNTMLNTVGGHQAAMQILKETINEEAADWDRLHPVHAGPIAPGQMREPRGSDIAGTTSTLQEQIGWMTNNPPIPVGEIYKRWIILGLNKIVRMYSPTSILDIKQGPKEPFRDYVDRFYKTLRAEQASQDVKNWMTETLLVQNANPDCKTILKALGPAATLEEMMTACQGVGGPGHKARVLAEAMSQVTNSATIMMQKGNFGNQRRTVKCFNCGKVGHIAKNCRAPRKKGCWKCGKEGHQMKDCTERQANFLGKIWPSHKGXPGNFLQSRXEPTAPPEESFRFGEETTTPPQKQEPIDREGYPLTSLKSLFGNDPLSQ

SEQ ID NO: 588 - protein, 502 aa, Human immunodeficiency virus
MGARASVLSGGELDRWEKIRLRPGGNKRYKLKHIVWASRELERFAVNPGLLETGDGCKQIIEQLQPSLQTGSEELRSLYNTVAVLYCVHQRIEIQDTKEALDKIEEEQNKSKKKAQQKAAAADTGNSSQVSQNYPIVQNMQGQMVHQPLSPRTLNAWVKVVEEKAFSPEVIPMFTALSEGATPQDLNTMLNTVGGHQAAMQMLKETINEEAAEWDRLHPVHAGPIAPGQMREPRGSDIAGTTSTLQEQIGWMTHNPPIPVGEIYKRWIILGLNKIVRMYSPTSILDIKQGPKEPFRDYVDRFYKTLRAEQATQEVKNWMTETLLVQNANPDCKTILKALGPGATLEDMMTACQGVGGPGHKARVLAEAMSQLTNSTAIMMQRGNFRNQRKTVKCFNCGKEGHIARNCRAPRKKGCWKCGKEGHQMKDCTERQANFLGKIWPSHKGRPGNFLQSRPEPTAPPEESFRFGEETTAPPQKQDQIDKELYPSASLKSLFGNDPSSQ

SEQ ID NO: 589 - protein, 499 aa, Human immunodeficiency virus
  misc_feature (357)..(357): Xaa can be any naturally occurring amino acid
  misc_feature (467)..(467): Xaa can be any naturally occurring amino acid
MGARASVLSGGELDKWEKIRLRPGGKKQYKLKHIVWASRELERFAVNPGLLETADGCRQILGQLQPSLQTGSEELRSLYNTIAVLYCVHQRIEVKDTKEALDKIEEEQNKCKKKAQQAAADTGNNSQVSQNYPIVQNLQGQMVHQAISPRTLNAWVKVVEEKAFSPEVIPMFSALSEGATPQDLNTMLNTVGGHQAAMQMLKETINEEAAEWDRLHPVHAGPIAPGQIREPRGSDIAGTTSTLQEQIAWMTNNPPIPVGEIYKRWIILGLNKIVRMYSPTSILDIKQGPKEPFRDYVDRFYKTLRAEQASQEVKNWMTETLLVQNANPDCKTILKALGPAATLEEMMTACQGVGGPXHKARVLAEAMSQVTNSATVMMQKGNFKGQRRSVKCFNCGKEGHIARNCRAPRKRGCWKCGKEGHQMKDCTERQANFLGKIWPSHKGRPGNFLQSRPEPTAPPAESFRFGXETTPSQKPEGIDKEMYPLASLKSLFGNDPSSQ

SEQ ID NO: 590 - protein, 496 aa, Human immunodeficiency virus
  misc_feature (459)..(459): Xaa can be any naturally occurring amino acid
MGARASVLSGGELDRWEKIRLRPGGKKKYKLKHIVWASRELERFAVNPGLLETAEGCRRILGQLQPSLQTGSEELKSLYNTVAVLYCVHQKIEIKDTKEALDKIEEEQNKSKKKAQQAAADTGNGSQVSQNYPIVQNLQGQMVHQAISPRTLNAWVKVVEEKAFSPEVIPMFSALSEGATPQDLNTMLNTVGGHQAAMQMLKETINEEAAEWDRLHPVHAGPIAPGQMREPRGSDIAGTTSTLQEQIGWMTNNPPIPVGEIYKRWIILGLNKIVRMYSPTSILDIRQGPKEPFRDYVDRFYKTLRAEQASQDVKNWMTETLLVQNANPDCKTILKALGPAATLEEMMTACQGVGGPGHKARVLAEAMSQVNSTTVMMQRGNFKNQRRIVKCFNCGKEGHIAKNCRAPRKKGCWKCGQEGHQMKDCTERQANFLGKIWPSHKGRPGNFLQSRPEPTAPPXESFRFGEGTTTPPQKQEPRDKELYPLASLKSLFGSDP

SEQ ID NO: 591 - protein, 502 aa, Human immunodeficiency virus
  misc_feature (26)..(26): Xaa can be any naturally occurring amino acid
  misc_feature (197)..(197): Xaa can be any naturally occurring amino acid
  misc_feature (282)..(282): Xaa can be any naturally occurring amino acid
  misc_feature (409)..(409): Xaa can be any naturally occurring amino acid
  misc_feature (467)..(467): Xaa can be any naturally occurring amino acid
MGARASVLSGGQLDRWEKIRLRPGGXKKYRLKHLVWASRELERFAVNPGLLETAEGCRQIIGQLQPSLQTGSEELRSLFNTVATLYCVHQRIDVKDTKEALEKVEEEQNQSKKKAQQAAADTGNSSQVSQNYPIVQNLQGQMVHQAISPRTLNAWVKVVEEKAFSPEVIPMFSALSEGATPQDLNTMLNTVGGHQAXMQMLKETINEEAAEWDRLHPVHAGPTAPGQMREPRGSDIAGTTSTLQEQIGWMTSNPPIPVGEIYKRWIIMGLNKIVRMYSPTSXLDIKQGPKEPFRDYVDRFYKTLRAEQATQEVKNWMTETLLVQNANPDCKTILKALGPAATLEEMMTACQGVGGPAHKARVLAEAMSQVTGSATIMMQKGNFGNQKKTIKCFNCGKIGHIARNCRAPXKKGCWKCGKEGHQMKDCIERQANFLGKIWPSHKGRPGNFLQNRPEPTAPPAESFGFGXEITTHSQKQESIDKDKELYPLTSLKSLFGNDPSSQ

SEQ ID NO: 592 - protein, 497 aa, Human immunodeficiency virus
  misc_feature (469)..(469): Xaa can be any naturally occurring amino acid
MGARASVLSGGKLDKWEKIRLRPGGKKKYKLKHIVWASRELERFALNPGLLETLEGCRQILGQIQPSLQTGSEELRSLYNTVATLYCVHQGIDIKDTKEALDRIEEEQNKSKKQAAAGPGNNSQVSQNYPIVQNMQGQMVHQAISPRTLNAWVKVVEEKAFSPEVIPMFAALSEGATPQDLNTMLNTVGGHQAAMQMLKETINEEAAEWDRLHPVHAGPTAPGQMRDPRGSDIAGTTSTLQEQIGWMTSNPPIQVGEIYKRWIILGLNKIVRMYSPTSILDIKQGPKEPFRDYVDRFYKTLRAEQATQEVKNWMTETLLVQNANPDCKTILKALGPAATLEEMMTACQGVGGPSHKARVLAEAMSQVTGTNTIMMQRGNFRNQRKIVKCFNCGKEGHIAKNCRAPRKKGCWKCGKEGHQMKDCTERQANFLGKFWPSHKGRPGNFLQSRPEPTAPPEESFRFGEETPTXSQKQDQIDKELYPSASLKSLFGNDPLLQ

SEQ ID NO: 593 - protein, 502 aa, Human immunodeficiency virus
MGARASVLSGGQLDRWEKIRLRPGGKKQYKLKHIVWASRELERFAVNPALMESAEGCKQILAQLQPSIQTGSEELKSLYNAIAVLYCVHQRIEIKDTKEALDKIQEEQNKSKKKAQQAAAAADAGNSSQASQNYPIVQNLQGQMVHQAISPRTLNAWVKVVEEKAFSPEVIPMFSALSEGATPQDLNTMLNSVGGHQAAMQMLKETINEEAAEWDRVHPVHAGPIAPGQMREPRGSDIAGTTSTLQEQIGWMTNNPPIPVGEIYKRWIILGLNKIVRMYSPTSILDIRQGPKEPFRDYVDRFYKTLRAEQASQEVKNWMTETLLVQNSNPDCKTILKALGPGATLEDMMTACQGVGGPGHKARVLAEAMSQITNNTANIMMQKGNFRSQRKIKCFNCGREGHIAKHCRAPRKKGCWKCGKEGHQMKDCTERQANFLGKIWPSNKGRPGNFLQSRPEPTAPPEESFRFGEETTTPSQKQEQINKELYPSVSLKSLFGNDPSSQ

SEQ ID NO: 594 - protein, 504 aa, Human immunodeficiency virus
  misc_feature (97)..(97): Xaa can be any naturally occurring amino acid
  misc_feature (468)..(468): Xaa can be any naturally occurring amino acid
MGARASILSGGELDRWEKIRLRPGGKKKYRLKHIVWASRELERFAVNPGLLETSEGCRQILGQLQPSLQTGSEELKSLYNTIATLYCVHRKIEVKDXKEALDMVEEEQNKSKKKAQQAAAAADTGNSSSKVSQNYPIVQNLQGQMVHQAISPRTLNAWVKVVEEKAFSPEVIPMFSALSEGATPQDLNTMLNTVGGHQAAMQMLKETINEEAAEWDRLHPVQAGPIAPGQMREPRGSDIAGTTSTLQEQIGWMTNNPPIPVGEIYKRWIILGLNKIVRMYSPTSILDIRQGPKEPFRDYVDRFYKTLRAEQASQEVKNWMTETLLVQNANPDCKTILKALGPAATLEEMMTACQGVGGPGHKARVLAEAMSQVTHPATIMMQRGNFRNQRKIIKCFNCGKEGHIAKNCRAPRKKGCWKCGKEGHQMKDCTERQANFLGKIWPSHKGGRPGNFLQSRPEPTAPPAESFXFGEETATPPPKQEPIDKELYPLASLKSLFGNDPLSQ

SEQ ID NO: 595 - protein, 500 aa, Human immunodeficiency virus
  misc_feature (95)..(95): Xaa can be any naturally occurring amino acid
  misc_feature (138)..(138): Xaa can be any naturally occurring amino acid
  misc_feature (162)..(162): Xaa can be any naturally occurring amino acid
  misc_feature (389)..(389): Xaa can be any naturally occurring amino acid
  misc_feature (451)..(451): Xaa can be any naturally occurring amino acid
  misc_feature (455)..(455): Xaa can be any naturally occurring amino acid
MGARASVLSGGELDRWEKIRLRPGGKKKYRLKHIVWASRELERFALNPGLLETSEGCRQILGQLQSSLETGSEEIKSLFNTIATLYCVHQRIDVXDTKEALEKIEEEQNKSKKQAQKAAADTGSKNQVSQNYPIVQNXQGQMVHQAISPRTLNAWVKVVEEXAFSPEVIPMFSALSEGATPQDLNTMLNTVGGHQAAMQMLKETINEEAAEWDRLHPVHAGPIAPGQMREPRGSDIAGTTSTLQEQIGWMTNNPPIPVGEIYKRWIIMGLNKIVRMYSPTSILDIRQGPKEPFRDYVDRFYKTLRAEQASQEVKNWMTETLLVQNANPDCKTILKALGPAATLEEMMTACQGVGGPGHKARVLAEAMSQVTNSANVMMQRGNFKNQRRXVKCFNCGKEGHIARNCRAPRKKGCWKCGKEGHQMKDCTERQANFLGKIWPSHKGRPGNFLQXRPEXSAPPEESFRFGEETATPSQKQEPRDKELYPLTSLKSLFGSDPSLQ

SEQ ID NO: 596 - protein, 500 aa, Human immunodeficiency virus
  misc_feature (90)..(90): Xaa can be any naturally occurring amino acid
  misc_feature (268)..(268): Xaa can be any naturally occurring amino acid
  misc_feature (302)..(302): Xaa can be any naturally occurring amino acid
  misc_feature (322)..(322): Xaa can be any naturally occurring amino acid
  misc_feature (338)..(338): Xaa can be any naturally occurring amino acid
  misc_feature (357)..(357): Xaa can be any naturally occurring amino acid
  misc_feature (418)..(418): Xaa can be any naturally occurring amino acid
  misc_feature (473)..(473): Xaa can be any naturally occurring amino acid
MGARASVLSGGELDRWEKIRLRPGGRKKYKLKHIVWASRELERFAVNPGLLETSDGCRQILQQLQPALQTGSEDLRSLYNTIATIYCVHXKIDVKDTKEALEKIEEEQNKSKKKEQQAAAGTGNISQVSQNYPIVQNLQGQMVHQPLSPRTLNAWVKVIEEKAFSPEVIPMFSALSEGATPQDLNTMLNTVGGHQAAMQMLKETINEEAAEWDRLHPVHAGPIAPGQMREPRGSDIAGTTSTLQEQIGWMTHNPPIPVGEIYKRWIIXGLNKIVRMYSPVSILDIKQGPKEPFRDYVDRFYXTLRAEQATQEVKNWMTETLXVQNANPDCKTILKALXPAATLEEMMTACQGVGGPXHKARVLAEAMSQVTNSTNIMMQRGNFKNQRKAVKCFNCGKEGHIAKNCRAPRKKGCWKCGXEGHQMKDCTERQANFLGKVWPSHKGRPGNFLQNRPEPTAPPEESFRFGDETATPXQKQEPIDKEMYPLASLRSLFGNDPSSQ

SEQ ID NO: 597 - protein, 499 aa, Human immunodeficiency virus
  misc_feature (183)..(183): Xaa can be any naturally occurring amino acid
  misc_feature (228)..(228): Xaa can be any naturally occurring amino acid
  misc_feature (275)..(275): Xaa can be any naturally occurring amino acid
  misc_feature (392)..(392): Xaa can be any naturally occurring amino acid
  misc_feature (395)..(395): Xaa can be any naturally occurring amino acid
  misc_feature (416)..(416): Xaa can be any naturally occurring amino acid
MGARASVLSGGELDKWEKIRLRPGGKKKYQLKHIVWASRELERFAVNPGLLETGDGCRKILGQLQPSLQTGSEELKSLFNTVATLYCVHQKIDVKDTREALDKIEEEQNKCKKKAQQATADTGNSNQVSQNYPIVQNLQGQMVHQAISPRTLNAWVKVVEEKAFSPEVIPMFTALSEGATPQXLNTMLNTVGGHQAAMQMLKETINEEAAEWDRLHPVQAGPIAPGQXREPRGSDIAGTTSTLQEQIGWMTSTPPIPVGEIYKRWIILGLNKIVXMYSPSSILDIKQGPKEPFRDYVDRFYKTLRAEQASQEVKAWMTETLLVQNSNPDCKTILKALGPGATLEEMMTACQGVGGPGHKARVLAEAMSQVTNSATIMMQKGNFRNQRKSVKXFNXGKEGHIARNCRAPRKKGCWKXGKEGHQMKDCTERQANFLGKIWPSHKGRPGNFLQNRPEPTAPPAESFGFGEEITTPPQKQEPIDKELYPLVSLKSLFGNDHSS

SEQ ID NO: 598 - protein, 500 aa, Human immunodeficiency virus
  misc_feature (46)..(46): Xaa can be any naturally occurring amino acid
  misc_feature (64)..(64): Xaa can be any naturally occurring amino acid
  misc_feature (77)..(77): Xaa can be any naturally occurring amino acid
  misc_feature (79)..(79): Xaa can be any naturally occurring amino acid
  misc_feature (88)..(88): Xaa can be any naturally occurring amino acid
  misc_feature (109)..(109): Xaa can be any naturally occurring amino acid
  misc_feature (111)..(111): Xaa can be any naturally occurring amino acid
  misc_feature (126)..(126): Xaa can be any naturally occurring amino acid
  misc_feature (157)..(157): Xaa can be any naturally occurring amino acid
  misc_feature (162)..(162): Xaa can be any naturally occurring amino acid
  misc_feature (168)..(168): Xaa can be any naturally occurring amino acid
  misc_feature (269)..(269): Xaa can be any naturally occurring amino acid
  misc_feature (312)..(312): Xaa can be any naturally occurring amino acid
  misc_feature (315)..(315): Xaa can be any naturally occurring amino acid
  misc_feature (406)..(406): Xaa can be any naturally occurring amino acid
  misc_feature (411)..(411): Xaa can be any naturally occurring amino acid
  misc_feature (478)..(478): Xaa can be any naturally occurring amino acid
MGARASVLSGGELDKWEKIRLRPGGKKKYKLKHIVWASRELERFAXNPGLLETTEGCRQILGQXQPSLQTGSEELKXLXNTIAVLYCXHQRIEVKDTKEALDKIEEEQXKXKKKAQQAAADTGNSXQVSQNYPIVQNLQGQMVHQAISPRTLNAWVXVIEEXAFSPEXIPMFSALSEGATPQDLNTMLNTVGGHQAAMQMLKETINEEAAEWDRLHPPQAGPVAPGQIRDPRGSDIAGTTSNLQEQITWMTSNPPIPVGEIYKRWIILXLNKIVRMYSPVSILDIRQGPKEPFRDYVDRFYKTLRAEQATQXVKXWMTETLLVQNANPDCKTILKALGPAATLEEMMTACQGVGGPGHKARVLAEAMSHMTNANAIMMQRGNFRNQRKTVKCFNCGKEGHIARNCXAPRKXGCWKCGKEGHQMKECTERQANFLGKIWPSHKGRPGNFLQSRPEPTAPPAESFRFGEETAPPSQKQEXIKEEMYPLASLKSLFGNDPSSQ

SEQ ID NO: 599 - protein, 502 aa, Human immunodeficiency virus
  misc_feature (31)..(31): Xaa can be any naturally occurring amino acid
  misc_feature (119)..(119): Xaa can be any naturally occurring amino acid
  misc_feature (149)..(149): Xaa can be any naturally occurring amino acid
  misc_feature (165)..(165): Xaa can be any naturally occurring amino acid
  misc_feature (221)..(221): Xaa can be any naturally occurring amino acid
  misc_feature (225)..(225): Xaa can be any naturally occurring amino acid
  misc_feature (245)..(245): Xaa can be any naturally occurring amino acid
  misc_feature (257)..(257): Xaa can be any naturally occurring amino acid
MGARASVLSGGELDRWEKIRLRPGGKKKYRXKHIVWASRELERFAVNPGLLETSGGCRQILEQLQPSLQTGSEELRSLYNTVATLYCVHQKIDIRDTKEALDKIEEEQNKSKKKAQQAXAAADTGNSSQVSQNYPIVQNMQGQMVHQPXTPRTLNAWVKVVEEKXFSPEVIPMFTALSEGATPQDLNTMLNTVGGHQAAMQMLKETINEEAAEWDRLHPVXAGPXAPGQIREPRGSDIAGTTSNXQEQVTWMTSNPXIPVGEIYKRWIILGLNKIVRMYSPTSILDIKQGPKEPFRDYVDRFYKTLRAEQATQEVKNWMTETLLVQNANPDCKTILRALGPGATLEEMMSACQGVGGPGHKARVLAEAMSQMTAQTNIMMQRGNFGNQRKPVKCFNCGKTGHIAKNCRAPRRKGCWKCGKEGHQMKDCTERQANFLGKIWPSHKGRPGNFLQSRPEPSAPPEESFRFGEETATPSQKQETIDKEMYPLASLKSLFGNDPSSQ

SEQ ID NO: 600 - protein, 502 aa, Human immunodeficiency virus
MGARASVLSGGKLDRWEKIRLRPGGKKKYKLKHIVWASRELERFAVNPGLLETSEGCRQILGQLQPSLQTGSEELKSLFNTIATLYCVHQGIEVKDTKEALDKIEEEQNKSKKKAQQAAAAADTGNNSPVSQNYPIVQNLQGQMVHQAISPRTLNAWVKVVEEKAFSPEVIPMFSALSEGATPQDLNTMLNTVGGHQAAMQMLKETINEEAAEWDRLHPVHAGPIAPGQMREPRGSDIAGTTSNLQEQIAWMTNNPPIPVGEIYKRWIILGLNKIVRMYSPTSILDIKQGPKEPFRDYVDRFYKTLRAEQASQDVKNWMTETLLVQNANPDCKTILKALGPAATLEEMMTACQGVGGPGHKARVLAEAMSQVTNNPVIMMQRGNFRNQRKTVKCFNCGKEGHLARNCRAPRKKGCWKCGKEGHQMKECTERQANFLGKIWPSHKGRPGNFLQSRPEPTAPPEESFRFGEETATPPQKQEPIDKELYPLASLKSLFGNDPSSQ

SEQ ID NO: 601 - protein, 500 aa, Human immunodeficiency virus
  misc_feature (24)..(24): Xaa can be any naturally occurring amino acid
  misc_feature (46)..(46): Xaa can be any naturally occurring amino acid
  misc_feature (51)..(51): Xaa can be any naturally occurring amino acid
  misc_feature (163)..(163): Xaa can be any naturally occurring amino acid
  misc_feature (197)..(197): Xaa can be any naturally occurring amino acid
  misc_feature (203)..(203): Xaa can be any naturally occurring amino acid
  misc_feature (384)..(384): Xaa can be any naturally occurring amino acid
  misc_feature (409)..(409): Xaa can be any naturally occurring amino acid
  misc_feature (480)..(480): Xaa can be any naturally occurring amino acid
MGARASVLSAGELDKWEKIRLRPXGKKKYRLKHIVWASRELERFAXNPGLXETSEGCRQILGQLQPALQTGSEELRSLYNTVATLYCVHSKIEVKDTKEALEKIEEEQNRSKKQTQQVAAGTGNSSQASQNYPIVQNLQGQMVHQPISPRTLNAWVKVVEEKXFSPEVIPMFSALSEGATPQDLNTMLNTVGGHQAXMQMLKXTINEEAAEWDRLHPAQAGPIAPGQIREPRGSDIAGTTSTLAEQIAWMTNNPPIPVGDIYKRWIILGLNKIVRMYSPTSILDIRQGPKEPFRDYVDRFYKCLRAEQASQDVKNWMTETLLVQNANPDCKTILKALGPAATLEEMMTACQGVGGPSHKARVLAEAMSQATNPANIMMQRGNFXNQRKTVKCFNCGKAGHIAKNCRAPXKKGCWKCGKEGHQMKDCNERQANFLGKIWPSHKGRPGNFLQSRPEPTAPPEESFSFGEETTTPPQRQEPIXKEMYPLTALKSLFGNDPSSQ

SEQ ID NO: 602 - protein, 500 aa, Human immunodeficiency virus
MGARASILSGGELDKWEKIRLRPQGKKKYKLKHLVWASRELERFAVNPGLLETTEGCRQILGQLQPSLQTGSEELRSLYNTIAVLYCVHQRIDVKDTKEALDRIEEEQNKSKKRAQQAAADTGNSSQVSQNYPIVQNMQGQMVHQALSPRTLNAWVKVVEEKAFSPEVIPMFSALSEGATPQDLNTMLNTVGGHQAAMQMLKETINEEAAEWDRLHPVHAGPPAPGQLREPRGSDIAGTTSTLQEQIGWMTNNPPIPVGEIYKRWIIMGLNKIVRMYSPTSILDIRQGPKEPFRDYVDRFYKTLRAEQASQEVKNWMTETLLVQNANPDCKTILKALGPGATLEEMMTACQGVGGPGHKARVLAEAMSQVTNSATIMMQRGSYKNQRKAVKCFNCGKEGHIAKNCRAPRKKGCWKCGKEGHQMKDCTERQANFLGKIWPSHKGRPGNFLQSRPEPSAPPEESFRFGEETATPSQRQEQKDKELYPLASLRSLFGNDPSSQ

SEQ ID NO: 603 - protein, 495 aa, Human immunodeficiency virus
MGARASVLSGGELDRWEKIRLRPGGKKKYQLKHIVWASRELERFAVNPGLLETSEGCKQILGQLQPSLQTGSEELRSLFNTVAVLYCVHQKIDVKDTKEALDKIEEEKKAQQAAAATGTSSQVSQNYPIVQNLQGQMVHQAISPRTLNAWVKVIEEKAFSPEVIPMFSALSEGATPQDLNTMLNTVGGHQAAMQMLKETINEEAAEWDRLHPVHAGPVAPGQMRDPRGSDIAGTTSTLQEQIGWMTSNPPIPVGEIYKRWIILGLNKIVRMYSPTSILDIRQGPKEPFRDYVDRFYKTLRAEQASQEVKNWMTETLLVQNSNPDCKTILKALGPGATLEEMMTACQGVGGPGHKARVLAEAMSQMTNSATIMMQKGNFRNQRKPVKCFNCGKEGHIAKNCRAPRKKGCWKCGKEGHQMKDCNERQANFLGKIWPSQKGRPGNFPQSRTEPTAPPAESFRFGEETTAPLQKQEPIDKELYPLASLKSLFGNDPLSQ

SEQ ID NO: 604 - protein, 500 aa, Human immunodeficiency virus
  misc_feature (178)..(178): Xaa can be any naturally occurring amino acid
  misc_feature (258)..(258): Xaa can be any naturally occurring amino acid
MGARASVLSAGELDKLEKIRLRPGGKKKYRLKHLVWASRELERFAVNPGLLETSGGCRQILGQLQPSLPTGSEELRSLYNTIAVLYCVHQKIEVKDTKEALDKIEEEQNKSKKKAQQAAADTGNSSQVSQNYPIVQNLQGQMVHQPLSPRTLNAWVKVVEEKAFSPEVIPMFSALSEXATPQDLNTMLNTVGGHQAAMQMLKETINEEAAEWDRLHPVHAGPIAPGQMREPRGSDIAGTTSTLQEQIGWMTHNPPIPXGEIYKRWIILGLNKIVRMYSPTSILDIRQGPKEPFRDYVDRFYKTLRAEQASQDVKNWMTETLLVQNANPDCKTILKALGPGATLEEMMTACQGVGGPGHKARVLAEAMSQMTNPAAIMMQRGNFRNQRKIVKCFNCGKEGHIAKNCRAPRKKGCWKCGQEGHQMKDCIERQANFLGKIWPSHKGRPGNFLQSRPEPTAPPAESFRFGEETTAPPQKQEQIDKDLYPMASLKSLFGSDPSSQ

SEQ ID NO: 605 - protein, 501 aa, Human immunodeficiency virus
MGARASVLSGGELDRWEKIRLRPGGKKKYKLKHIVWASRELERFAVNPGLLETSDGCRQILKQLQPSIQTGSEELRSLFNTVAVLYCVHQRIEIKDTKEALEKIEEEQNKSKKKAQQQQAAADTGNSNQSSQNYPIVQNLQGQMVHQPISPRTLNAWVKVIEEKAFSPEVIPMFSALSEGATPTDLNIMLNTVGGHQAAMQMLKETINEEAAEWDRLHPVHAGPIAPGQMREPRGSDIAGTTSNLQEQIGWMTNNPPIPVGDIYKRWIILGLNKIVRMYSPVSILDIRQGPKEPFRDYVDRFYKTLRAEQASQDVKNWMTETLLVQNANPDCKTILKALGPAATLEEMMTACQGVGGPGHKARVLAEAMSQVTNSATIMMQKGNFRNQRKTVKCFNCGKEGHVARNCRAPRKRGCWKCGKEGHQMKECTERQANFLGKIWPSHKGRPGNFLQSRPEPSAPPEESFRFGEETATPSQRQEPIDKEKEMYPLASLKSLFGNDP

SEQ ID NO: 606 - protein, 503 aa, Human immunodeficiency virus
  misc_feature (17)..(17): Xaa can be any naturally occurring amino acid
  misc_feature (49)..(49): Xaa can be any naturally occurring amino acid
  misc_feature (58)..(58): Xaa can be any naturally occurring amino acid
  misc_feature (83)..(83): Xaa can be any naturally occurring amino acid
  misc_feature (91)..(91): Xaa can be any naturally occurring amino acid
  misc_feature (139)..(139): Xaa can be any naturally occurring amino acid
  misc_feature (144)..(144): Xaa can be any naturally occurring amino acid
  misc_feature (162)..(162): Xaa can be any naturally occurring amino acid
  misc_feature (260)..(260): Xaa can be any naturally occurring amino acid
  misc_feature (269)..(269): Xaa can be any naturally occurring amino acid
  misc_feature (327)..(327): Xaa can be any naturally occurring amino acid
  misc_feature (337)..(337): Xaa can be any naturally occurring amino acid
  misc_feature (382)..(382): Xaa can be any naturally occurring amino acid
  misc_feature (407)..(407): Xaa can be any naturally occurring amino acid
MGARASVLSGGQLDRWXKIRLRPGGKKKYRLKHLVWASRELERFAVNPXLMETSEGCXQILGQLHPSIQTGSEEIKSLYNTIXTLYCVHQXIEVKDTKEALDKIEEEQNKCKKQVQQAAAATGSSSQVSQNYPIVQNLXGQMVXQSLSPRTLNAWVKVVEEXAFSPEVIPMFSALSEGATPQDLNTMLNTVGGHQAAMQMLKETINEEAAEWDRLHPVHAGPVAPGQMREPRGSDIAGTTSTLQEQIGWMTNNPPIPVGXIYKRWIIMXLNKIVRMYSPVSILDIKQGPKEPFRDYVDRFYKTLRAEQGSQEVKNWMTETLLVQNAXPDCKIILKGXGAGATLEEMMTACQGVGGPGHKARILAEAMSQVTNPATIMMQRGXFRPQRKIVKCFNCGKEGHIAKNCRXPRKKGCWKCGKEGHQMKDCAERQANFLGRIWPSHKGRPGNFLQSRPEPSAPPEPTAPPEESFRFGEKTTTPSQKQEQIDKELYPLTSLKSLFGSDP

SEQ ID NO: 607 - protein, 500 aa, Human immunodeficiency virus
  misc_feature (251)..(251): Xaa can be any naturally occurring amino acid
MGARASVLSGGELDRWEKIRLRPMGKKKYRLKHIVWASKELERFAVNPGLLETSEGCKQILIQLQPSLQTGSEELRSLYNTVATLYCVHQKIEVKDTKEALDRIEEEQNKSKKKAQQAAADTGNSSQVSQNYPIVQNLQGQMVHQPISPRTLNAWVKVVEEKAFSPEVIPMFSALSEGATPQDLNTMLNTVGGHQAAMQMLKETINEEAAEWDRIHPVHAGPVAPGQMREPRGSDIAGTTSTLQEQINWMXSNPPIPVGEIYKRWIILGLNKIVRMYSPTSILDIRQGPKEPFRDYVDRFYKTLRAEQASQDVKNWMTETLLVQNANPDCKTILKALGPAATLEEMMTACQGVGGPGHKARVLAEAMSQVTGSATIMMQKGNFRNQRKTVKCFNCGKEGHIARNCRAPRKKGCWKCGKEGHHIKDCTERQANFLGRIWPSTKGRPGNFLQNRPEPTAPPAESFRFGEETTTPSQKQEPIDKELYPLASLRSLFGNDPSSQ

SEQ ID NO: 608 - protein, 505 aa, Human immunodeficiency virus
  misc_feature (232)..(232): Xaa can be any naturally occurring amino acid
  misc_feature (458)..(458): Xaa can be any naturally occurring amino acid
MGARASVLSGGELDRWEKIRLRPGGKKKYKLKHVVWASRELERFAVNPGLLETSGGCRQILEQLQPSLQTGSEELKSLYNTIAVLYCVHQRIEVKDTKEALDKIEEEQNKSKKKAQQAAADTGNNSNSQVSQVSQNYPIVQNAQGHMVHQAISPRTLNAWVKVVEEKAFSPEVIPMFSALSEGATPQDLNTMLNTVGGHQAAMQMLKETINEEAAEWDRLHPVHAGPVAPGXMREPRGSDIAGTTSTLQEQIGWMTNNPPIPVGEIYKRWIIMGLNKIVRMYSPTSILDIKQGPKEPFRDYVDRFYKTLRAEQATQEVKNWMTETLLVQNANPDCKTILKALGPAATLEEMMTACQGVGGPGHKARVLAEAMSQVTNSATIMMQRGNFRNQRKMVKCFNCGKEGHIAKNCRAPRKKGCWKCGREGHQMKDCTERQANFLGKIWPSHKGRPGNFLQSRXEPTAPPEESFRFGEETTAPSQKQEPIDKELYPLASLRSLFGNDPSSQ

SEQ ID NO: 609 - protein, 501 aa, Human immunodeficiency virus
  misc_feature (22)..(22): Xaa can be any naturally occurring amino acid
  misc_feature (30)..(30): Xaa can be any naturally occurring amino acid
  misc_feature (44)..(44): Xaa can be any naturally occurring amino acid
  misc_feature (63)..(63): Xaa can be any naturally occurring amino acid
  misc_feature (160)..(160): Xaa can be any naturally occurring amino acid
  misc_feature (165)..(165): Xaa can be any naturally occurring amino acid
  misc_feature (198)..(198): Xaa can be any naturally occurring amino acid
  misc_feature (217)..(217): Xaa can be any naturally occurring amino acid
  misc_feature (219)..(219): Xaa can be any naturally occurring amino acid
  misc_feature (293)..(293): Xaa can be any naturally occurring amino acid
MGARASVLSGGGLDRWEKIRLXPGGKKKYXLKHIVWASRELERXAVNPGLLETSDGCRQILQXLQPSLKTGSEELTSLYNTVATLYCVHQKIDVKDTKEALDKIEEEQNKSKTQAQQAAAANTGNSSQVSQNYPIVQNIQGQMVHQPLSPRTLNAWVKVXEEKAXSPEVIPMFSALSEGATPQDLNTMLNTVGGHQAXMQMLKETINEEAADWDRLXPXHAGPIAPGQMREPRGSDIAGSTSTLQEQIGWMTSNPPIPVGEIYKRWIILGLNKIVRMYSPTSILDIKQGPKEXFRDYVDRFYKTLRAEQCTQEVKNWMTETLLVQNSNPDCKTILKALGPAATLEEMMTACQGVGGPGHKARVLAEAMSQVTSSTIMMQRGNFKSQRKTIKCFNCGKEGHLARNCRAPRKKGCWKCGKEGHQMKECTERQANFLGKIWPSHKGRPGNFLQSRPEPTAPPLPPEESFREEATAPPQKQDPIDKELYPLTSLKSLFGSDPSSQ

SEQ ID NO: 610 - protein, 503 aa, Human immunodeficiency virus
  misc_feature (250)..(250): Xaa can be any naturally occurring amino acid
  misc_feature (263)..(263): Xaa can be any naturally occurring amino acid
  misc_feature (340)..(340): Xaa can be any naturally occurring amino acid
  misc_feature (361)..(361): Xaa can be any naturally occurring amino acid
  misc_feature (364)..(364): Xaa can be any naturally occurring amino acid
  misc_feature (406)..(406): Xaa can be any naturally occurring amino acid
  misc_feature (412)..(412): Xaa can be any naturally occurring amino acid
  misc_feature (459)..(459): Xaa can be any naturally occurring amino acid
MGARASVLSGGQLDRWEKIRLRPGGKKRYKLKHIVWASRELERFAVNPGLLETSEGCRQILGQLQPSLQTGSEELKSLYNTVATLYCVHQRIDVKDTKEALDKIEEEQNKSKKKEQQAVADTGSKSQVSQVSQNYPIVQNLQGQMVHQAISPRTLNAWVKVVEEKAFSPEVIPMFSALSEGATPQDLNTMLNTVGGHQAAMQMLKETINEEAAEWDRLHPVHAGPVAPGQMREPRGSDIAGVTSTLQEQXGWMTSNPPIPVGXVYKKWIIIGLNKIVRMYSPTSILDIRQGPKEPFRDYVDRFYKTLRAEQASQEVKNWMTETLLVQNANPDCRTILKAXGPAATLEEMMTACQGVGGPGXKAXVLAEAMSQATNSAAIMVQRGNYKGQRKTVKCFNCGKEGHISXNCRAPXKKGCWKCGKEGHQMKECTERQANFLGKIWPSHKGRPGNFLQNRPEPXAPPEESFRFGEEPATPPQKQEPMDKELYPLASLRSLFGNDPSSQ

SEQ ID NO: 611 - protein, 504 aa, Human immunodeficiency virus
  misc_feature (114)..(114): Xaa can be any naturally occurring amino acid
  misc_feature (358)..(358): Xaa can be any naturally occurring amino acid
  misc_feature (436)..(436): Xaa can be any naturally occurring amino acid
  misc_feature (488)..(488): Xaa can be any naturally occurring amino acid
MGARASVLSGGELDRWEKIRLRPGGKKKYKLKHIVWASRELERFAVNPGLLETSGGCRQILAQLQPALQTGSEELKSLYNTVAVLYCVHQQIEIKDTKEALDKIEEEQNKSKKXAQQTAADAAAASSQVSQNYPIVQNLQGQMVHQAISPRTLNAWVKVVEEKAFSPEVIPMFSALSEGATPQDLNTMLNTVGGHQAAMQMLKETINEEAAEWDRMHPVHAGPIAPGQMREPRGSDIAGTTSTLQEQIGWMTSNPPIPVGEIYKRWIILGLNKIVRMYSPTSILDIKQGPKEPFRDYVDRFYKVLRAEQASQDVKNWMTETLLVQNANPDCKTILKALGPAATLEEMMTACQGVGGPXHKARVLAEAMSQVTSSAAIMMQKGNFRSQRKTVKCFNCGKEGHIARNCRAPRKKGCWKCGREGHQMKDCDERQANFLXKIWPSHKGRPGNFLQNRPEPTAPPSRTEPTAPPEESFRFGEETTTPSQKQEXERYPLASLRSLFGNDP

SEQ ID NO: 612 - protein, 509 aa, Human immunodeficiency virus
MGARASVLSGGKLDSWEKIRLRPGGRKKYKLKHIVWASRELERFAVNPGLLETAEGCRKILGQLQPSLQTGSEELKSLYNTIAVLYCVHQRIDVKDTKEALEKIEEEQNKSKKKAQQAAADTGNSSQVSQNYPIVQNLQGQMVHQAISPRTLNAWVKVVEEKSFSPEVIPMFSALSEGATPQDLNTMLNTVGGHQAAMQMLKETINEEAAEWDRLHPVHAGPIAPGQMREPRGSDIAGTTSTLQEQIGWMTNNPPIPVGEIYKRWIILGLNKIVRMYSPTSILDIRQGPKEPFRDYVDRFYKTLRAEQASQDVKNWMTETLLVQNANPDCKTILRALGPAATLEEMMTACQGVGGPGHKARVLAEAMSQVTNSNTIMMQRGNFRNQRKSVKCFNCGKEGHIAKNCRAPRRKGCWKCGKEGHQMKDCTERQANFLGKIWPSHKGRPGNFLQSRPEPTAPQSRPEPTAPPAESFRFGEETITPSPKQEPIDKGLYPSDSLRSLFGNDPLSQ

SEQ ID NO: 613 - protein, 497 aa, Human immunodeficiency virus
  misc_feature (143)..(143): Xaa can be any naturally occurring amino acid
MGARASVLSGGKLDKWEKIRLRPGGKKKYKLKHIVWASRELERFAINPGLLETSEGCRQILGQLHSSLQTGSEELRSLYNTVATLYCVHQDIGVKDTKEALDRVEEEQNKIKKSAQQAADTGNSSKVVSQNYPIVQNLQGQMXHQAISPRTLNAWVKVIEEKAFSPEVIPMFTALSEGATPQDLNTMLNTVGGHQAAMQMLKETINEEAAEWDRLHPVQAGPVAPGQMREPRGSDIAGTTSTLQEQIAWMTSNPPVPVGEIYKRWIILGLNKIVRMYSPVSILDIKQGPKEPFRDYVDRFYKTLRAEQASVEVKNWMTETLLVQNSNPDCKTILKALGPSATLEEMMTACQGVGGPGHKARVLAEAMSQVTNSANVMMQRGNFRNQRKTVKCFNCGKEGHIARNCRAPRKKGCWKCGKEGHQMKDCTERQANFLGKIWPSHKGRPGNFPQSRTEPSAPPEESFPETATPFQRQEPIDKELSPLASLKSLFGNDPSSQ

SEQ ID NO: 614 - protein, 504 aa, Human immunodeficiency virus
MGARASVLSGGELDRWEKIRLRPGGKKKYRLKHIVWASRELERFAVNPGLLETAAGCRQILGQLQPSLQTGSEELKSLYNAIAVLYCVHQKIDVKDTKEALDKIEEEQKKSKKTTQQAAAAAAADTGNSSQVSQNYPIVQNLQGQMVHQAISPRTLNAWVKVIEEKAFSPEVIPMFTALSEGATPQDLNTMLNTVGGHQAAMQMLKETINEEAAEWDRLHPVHAGPIAPGQMREPRGSDIAGTTSNLQEQIGWMTSNPPIPVGEIYKRWIILGLNKIVRMYSPTSILDIRQGPKEPFRDYVDRFYKTLRAEQASQDVKNWMTETLLVQNANPDCKTILKALGPGATLEEMMTACQGVGGPGHKARVLAEAMSQVTNPATIMMQKGNFRNQRKTVKCFNCGKEGHIARNCRAPRKRGCWKCGKEGHQMKDCTERQANFLGKIWPSSKGRPGNFLQSRPEPSAPPEESLRLGGETTTPSQRQEPIDRELYPLASLKSLFGNDPSSQ

SEQ ID NO: 615 - protein, 512 aa, Human immunodeficiency virus
  misc_feature (447)..(447): Xaa can be any naturally occurring amino acid
  misc_feature (478)..(478): Xaa can be any naturally occurring amino acid
  misc_feature (484)..(484): Xaa can be any naturally occurring amino acid
MGARASVLSGGQLDKWEKIRLRPGGKKRYQLKHIVWASRELERFSINPGLLETSEGCRQILGQLQPSLQTGSEELKSLYNAVAVLYCVHQNIEVKDTKEALDKIEEEQNKSKKKAQQAAAAAADTGNSSQSSQNYPIVQNVQGQMVYQSISPRTLNAWVKVIEEKAFSPEVIPMFSALSEGATPSDLNLMLNTVGGHQAAMQMLKETINEEAAEWDRTHPVHAGPVAPGQMREPRGSDIAGTTSTLQEQIAWMTGNPVIPVGDIYKRWIILGLNKIVRMYSPTSILDIKQGPKEPFRDYVDRFYKVLRAEQASQDVKNWMTETLLVQNANPDCKTILKALGPAATLEEMMTACQGVGGPSHKARVLAEAMSQVTNSATIMMQRGNPRNQRKIIKCFNCGKEGHIARNCKAPRKKGCWKCGREGHQMKECTERQANFLGKIWPSHKGXPGNFLQSRPEPTAPPAESLPTAPPVESFRFXEETTTXSQKQGPIDKELYPLASLRSLFGNDPSSQ

SEQ ID NO: 616 - protein, 500 aa, Human immunodeficiency virus
MGARASVLSGGKLDTWEKIRLRPGGKKTYKLKHIVWASRELERFALNPGLLETAEGCRQILGQLQPSLQTGSEELKSLHNAVAVLYCVHQRIEVRDTKEALDKIEEEQNKSKKKAQQAAADTGSSSQVSQNYPIVQNIQGQMVHQAISPRTLNAWVKVIEEKAFSPEVIPMFSALSEGATPQDLNTMLNTVGGHQAAMQMLKETINEEAAEWDRVHPVHAGPVAPGQMREPRGSDIAGTTSTLQEQIGWMTNNPPIPVGEIYKRWIILGLNKIVRMYSPVSILDIRQGPKEPFRDYVDRFYKTLRAEQASQEVKNWMTETLLVQNANPDCKTILKALGPAATLEEMMTACQGVGGPGHKARVLAEAMSQVTNSATIMMQRGNFRNQRKIIKCFNCGKEGHLARNCKAPRKRGCWKCGKEGHQMKDCTERQANFLGKIWPSQKGRPGNFLQSRPEPSAPPEESFRFGEETITPPQKQEPIDKDRHPLTSLRSLFGNDPSSQ

SEQ ID NO: 617 - protein, 499 aa, Human immunodeficiency virus
MGARASVLSGGKLDKWEKIQLRPGGKKRYKLKHIVWASRELERFALNPGLLETGEGCRQLLGQLQPALQTGSEELKSLHNTVATLYCVHQGIEVRDTKEALDKIEEEQNKSKKKAQQAAADPGNSSQVSQNYPIVQNLQGQMVHQSLSPRTLNAWVKVIEEKAFSPEVIPMFSALSEGATPTDLNTMLNTVGGHQAAMQMLKETINEEAAEWDRLHPVHAGPIAPGQMREPRGSDIAGTTSTLQEQIGWMTNNPPIPVGDIYKRWIILGLNKIVRMYSPVSILDIKQGPKEPFRDYVDRFYKTLRAEQASQDVKNWMTETLLVQNANPDCKTILKALGPAATLEEMMTACQGVGGPGHKARVLAEAMSQVTNSNTVMMQRGNFRNQRKIVKCFNCGKEGHIARNCRAPRKKGCWKCGKEGHQMKDCTERQANFLGKIWPSYKGRPGNFLQSRPEPSAPPAESFRFGEETTPSQKQEQIDKEMYPLASLKSLFGNDPSSQ

SEQ ID NO: 618 - protein, 500 aa, Human immunodeficiency virus
  misc_feature (28)..(28): Xaa can be any naturally occurring amino acid
  misc_feature (55)..(55): Xaa can be any naturally occurring amino acid
  misc_feature (68)..(68): Xaa can be any naturally occurring amino acid
  misc_feature (161)..(161): Xaa can be any naturally occurring amino acid
  misc_feature (267)..(267): Xaa can be any naturally occurring amino acid
  misc_feature (295)..(295): Xaa can be any naturally occurring amino acid
  misc_feature (385)..(385): Xaa can be any naturally occurring amino acid
  misc_feature (388)..(388): Xaa can be any naturally occurring amino acid
  misc_feature (460)..(460): Xaa can be any naturally occurring amino acid
MGARASVLSGGKLDQWEKIRLRPGGKKXYKLKHIVWASRELERFALNPGLLETAXGCRQILGQLQPAXQTGTEEIRSLYNTVVTLYCVHQRIEVKDTNEALEKIKEEQNKSKKETQQAAADTGKSNQVSQNYPVVQNMQGQMVHQPVSPRTLNAWVKVVEXKAFSPEVIPMFSALAEGATPQDLNTMLNTVGGHQAAMQMLKETINEEAAEWDRLHPVHAGPIAPGQMREPRGSDIAGTTSTLQEQIGWMTNNPPIPVGEIYKRWIXLGLNKIVRMYSPTSILDIKQGPKEPFRXYVDRFYKTLRAEQASQEVKNWMTETLLVQNSNPDCKTILKALGPGATLEEMMTACQGVGGPSHKARVLAEAMSQATSASAMMMQRGNFRXQRXIVKCFNCGKEGHIAKNCRAPRKKGCWKCGKEGHLMKECTERQANFLGKIWPSHKGRPGNFLQSRPEPTAPPXESFRFGEETTTPPQKQEPIDKELYPLSSLKSLFGNDPSSQ

SEQ ID NO: 619 - protein, 500 aa, Human immunodeficiency virus
  misc_feature (8)..(8): Xaa can be any naturally occurring amino acid
  misc_feature (15)..(15): Xaa can be any naturally occurring amino acid
  misc_feature (44)..(44): Xaa can be any naturally occurring amino acid
  misc_feature (128)..(128): Xaa can be any naturally occurring amino acid
  misc_feature (138)..(138): Xaa can be any naturally occurring amino acid
  misc_feature (167)..(167): Xaa can be any naturally occurring amino acid
  misc_feature (177)..(177): Xaa can be any naturally occurring amino acid
  misc_feature (306)..(306): Xaa can be any naturally occurring amino acid
  misc_feature (334)..(334): Xaa can be any naturally occurring amino acid
  misc_feature (478)..(478): Xaa can be any naturally occurring amino acid
  misc_feature (490)..(490): Xaa can be any naturally occurring amino acid
  misc_feature (495)..(495): Xaa can be any naturally occurring amino acid
  misc_feature (499)..(499): Xaa can be any naturally occurring amino acid
MGARASVXSGGKLDXWEKIRLRPGGKKQYQLKHIVWASRELERXALNPGLLETSEGCRQILGQLQSSLQTGSEELKSLYNTVATLYCVHQNIDVRDTKEALDKIEEEQNKGKKNAQQAAANTGNNIPXSQNYPIVQNXQGQMVHQALSPRTLNAWVKVIEEKAFSPXVIPMFSALSXGATPQDLNTMLNTVGGHQAAMQMLKETINEEAAEWDRLHPVHAGPIAPGQMREPRGSDIAGTTSTLQEQIAWMTNNPPIPVGEIYKRWIILGLNKIVRMYSPVSILDIRQGPKEPFRDYVDRFYKTLRXEQATQEVKNWMTETLLVQNANPDCKTIXKALGPGASLEEMMTACQGVGGPGHKARVLAEAMSQVTNPATIMLQKGNFRNQRKTVKCFNCGKEGHIARNCRAPRKKGCWKCGKEGHQMKECTERQANFLGKIWPSHKGRPGNFLQSRPEPTAPPEESFRFGEETTTPSQKPEXKDKEMYPLASLXSLFGXDPSXQ

SEQ ID NO: 620 - protein, 498 aa, Human immunodeficiency virus
  misc_feature (64)..(64): Xaa can be any naturally occurring amino acid
  misc_feature (73)..(73): Xaa can be any naturally occurring amino acid
  misc_feature (90)..(90): Xaa can be any naturally occurring amino acid
  misc_feature (95)..(95): Xaa can be any naturally occurring amino acid
  misc_feature (118)..(118): Xaa can be any naturally occurring amino acid
  misc_feature (460)..(460): Xaa can be any naturally occurring amino acid
MGARASVLSGGQLDKWERIRLRPGGKKQYRLKHIVWASRELERFAVNPGLLETAEGCKQILGQXQPALQTGSXELKSLYNTVATLYCVHXQIDVXDTKEALEKIEEEQNKSKKKAQQXAADTRNSSQVSQNYPIVQNLQGQMVHQAISPRTLNAWVKVIEEKAFSPEVIPMFSALSEGATPQDLNTMLNTVGGHQAAMQMLKETINEEAAEWDRLHPVHAGPIAPGQMREPRGSDIAGTTSTLQEQIGWMTNNPPIPVGEIYKRWIILGLNKIVRMYSPVSILDIRQGPKEPFRDYVDRFYKTLRAEQASQEVKNWMTETLLVQNANPDCKTILKALGPAATLEEMMTACQGVGGPGHKARVLAEAMSQVTNSTSIMMQGGSMRNQRKIVKCFNCGKVGHIAKNCRAPRKRGCWRCGKEGHQMKDCSEKQANFLGKIWPSHKGRPGNFAQNRLEPTAPPXESFRFGEETTTPSQKQQIDKDNPLASLRSLFGNDPSSQ

SEQ ID NO: 621 - protein, 500 aa, Human immunodeficiency virus
  misc_feature (62)..(62): Xaa can be any naturally occurring amino acid
  misc_feature (75)..(75): Xaa can be any naturally occurring amino acid
  misc_feature (91)..(91): Xaa can be any naturally occurring amino acid
  misc_feature (93)..(93): Xaa can be any naturally occurring amino acid
  misc_feature (476)..(476): Xaa can be any naturally occurring amino acid
  misc_feature (478)..(478): Xaa can be any naturally occurring amino acid
MGARASVLSGGELDRWEKIRLRPGGKKQYKLKHIVWASRELERFAVNPGLLETSEGCRQILXQLQPALQTGSEEXRSLFNTVAVLYCVHQXIXVKDTKEALDKIEEEQNKSKKKAQQTAAGTGNSSQVSQNYPIVQNLQGQMVHQAISPRTLNAWVKVVEEKAFSPEVIPMFAALSEGATPQDLNTMLNTVGGHQAAMQILKETINEEAAEWDRLHPVHAGPIAPGQMREPRGSDIAGTTSTLQEQIGWMTNNPPIPVGEIYKKWIILGLNKIVRMYSPTSILDIRQGPKEPFRDYVDRFYRTLRAEQASQDVKNWMTETLLVQNANPDCKTILKALGPAATLEEMMTACQGVGGPGHKARVLAEAMSQVTNSATIMMQKSNFRNQRKTVKCFNCGKEGHIARNCRAPRKKGCWKCGKEGHQMKDCTERQANFLGKIWPSYKGRPGNFLQSRPEPTAPPEESFRFGEETTTPPQKXEXIDKELYPLASLKSLFGNDPSSQ

SEQ ID NO: 622 - protein, 500 aa, Human immunodeficiency virus
MGARASVLSGGELDRWEKIRLRPGGKKKYKLKHIVWASRELERFAVNPSLLETSEGCRQILGQLHPSLQTGSEELKSLYNTVAVLYCVHQRIEIKDTKEALDKIEEEQNKSKKKAQQTAADTGSNSQVSQNYPIVQNLQGQMVHQPISPRTLNAWVKVVEEKAFSPEVIPMFSALSEGATPQDLNTMLNTVGGHQAAMQMLKETINEEAAEWDRLHPVHAGPVAPGQMREPRGSDIAGTTSTLQEQIGWMTNNPPIPVGDIYKRWIILGLNKIVRMYSPTSILDIKQGPKEPFRDYVDRFYKTLRAEQASQEVKGWMTETLLVQNANPDCKTILKALGPAATLEEMMTACQGVGGPGHKARVLAEAMSQVTNSATVMMQKGNFRSQRRIVKCFNCGKEGHIAKNCRAPRKKGCWKCGKEGHQLKDCTERQANFLGKIWPSYKGRPGNFLQSRPEPTAPPEESFRFGEETTTPPQKQEPIDKEMYPLASLKSLFGNDPLSQ

SEQ ID NO: 623 - protein, 499 aa, Human immunodeficiency virus
MGARASVLSGGELDKWEKIRLRPGGKKKYKLKHIVWASRELERFAVNPGLLETSEGCRQILGQLQPSLQTGSEELGSLYNTMAVLYCVHQRIDVKDTKEALDKIEEEQNKSKKKAQQAAAGTGNSSQVSQNYPIVQNLQGQMVHQAISPRTLNAWVKVIEEKAFSPEVIPMFSALSEGATPQDLNTMLNTVGGHQAAMQMLKETINEEAAEWDRLHPVHAGPIAPGQMREPRGSDIAGTTSTLQEQIGWMTHNPPIPVGDIYKKWIILGLNKIVRMYSPTSILDIKQGPKEPFRDYVDRFYKTLRAEQASQEVKNWMTETLLVQNANPDCKTILKALGPGATLEEMMTACQGVGGPGHKARVLAEAMSQVTNPSTIMIQKGNFRNQRKTVKCFNCGKEGHIAKNCRAPRKKGCWKCGKEGHQMKDCTERQANFLGKIRPSHKGRPGNFPQSRTEPTAPPEENFRFGEETTPPQKQEPIDKELYPLASLKSLFGNDPLSQ

SEQ ID NO: 624 - protein, 509 aa, Human immunodeficiency virus
MGARASVLSGGELDRWEKIRLRPGGRKKYRLKHVVWASRELERFAVNPGLLETSEGCRQILGQLQPSLQTGSEELRSLYNTIAVLYCVHRKIEVKDTKEALDKIEEEQNKSKKKAQPAAADTGNSSQATPGGPVSQNYPIVQNLQGQMVHQAISPRTLNAWVKVVEEKAFSPEVIPMFSALSEGATPQDLNTMLNTVGGHQAAMQMLKETINEEAAEWDRLHPVHAGPIAPGQMREPRGSDIAGTTSTLQEQIGWMTNNPPIPVGEIYKRWIILGLNKIVRMYSPTSILDIKQGPKEPFRDYVDRFYKTLRAEQASQEVKNWMTETLLVQNANPDCKTILKALGPAATLEEMMTACQGVGGPSHKARVLAEAMSQVNQATIMMQKGNFRNQRKIVKCFNCGKEGHIARNCKAPRKRGCWKCGKDGHQMKDCTERQANFLGKIWPSHKGRPGNFLQNRPESRPEPSAPPEESFRFGEETAFPSQKQEPIDKELYPLVSLKSLFGNDPSSQ

SEQ ID NO: 625 - protein, 504 aa, Human immunodeficiency virus
MGARASVLSGGKLDRWEKIRLRPGGKKKYQLKHIVWASRELERFAVNPSLVETSEGCRQILRQLQPSLQTGSEELKSLYNTIAVLYCVHQNIEVKDTKEALDKIEEEQNKSEKKAQQAAADTNNNSPVSQNFPIVQNLQGQMVHQAISPRTLNAWVKVVEEKAFSPEVIPMFAALSEGATPQDLNTMLNTVGGHQAAMQMLKETINEEAAEWDRLHPVHAGPIAPGQMREPRGSDIAGTTSTLQEQIGWMTSNPAVPVGEIYKRWIIMGLNKVVRMYSPTSILDIKQGPKEPFRDYVDRFYKTLRAEQASQEVKNWMTETLLVQNSNPDCKTILKALGPAATLEEMMTACQGVGGPSHKAKILAEAMSQVTNSATIMMQRGNFKGQRKTVKCFNCGKEGHVAKNCRAPRKKGCWKCGREGHQMKDCTERQANFLGKIWPSHKGRPGNFLQNRPESRLEPTAPPAESFRFGEETTTPSQKQEQTDKELYPLASLRSLFGNDPSSQ

SEQ ID NO: 626 - protein, 500 aa, Human immunodeficiency virus
MGARASVLSGGELDRWEKIRLRPGGKKKYRLKHIVWASRELERFAVNPSLLETAEGCRQILGQLQPALQTGSEELKSLFNTVAVLYCVHQRIEVKDTKEALDKIEEEQNKSKKKAQQAAADTGNSSQVSQNYPIVQNMQGQMIHQAISPRTLNAWVKVIEEKAFSPEVIPMFSALSEGATPHDLNTMLNAVGGHQAAMQMLKETINEEAAEWDRLHPVHAGPVAPGQMREPRGSDIAGTTSTLQEQIGWMTSNPPIPVGEVYKKWIIMGLNKIVRMYSPTSILDIKQGPKEPFRDYVDRFYKTLRAEQATQEVKNWMTETLLVQNANPDCKTILKALGPAATLEEMMTACQGVGGPGHKARVLAEAMSQVTSPATIMMQKGNFRNPRKSVKCFNCGKEGHIAKNCRAPRKKGCWKCGREGHQMKDCTERQANFLGKIWPSYKGRPGNFLQSRLEPTAPLEESFRFREETTTPSQKQEPIDKEQYPLTSLRSLFGNDPSSQ

SEQ ID NO: 627 - protein, 500 aa, Human immunodeficiency virus
  misc_feature (12)..(12): Xaa can be any naturally occurring amino acid
  misc_feature (67)..(67): Xaa can be any naturally occurring amino acid
  misc_feature (223)..(223): Xaa can be any naturally occurring amino acid
  misc_feature (292)..(292): Xaa can be any naturally occurring amino acid
  misc_feature (326)..(326): Xaa can be any naturally occurring amino acid
  misc_feature (442)..(442): Xaa can be any naturally occurring amino acid
  misc_feature (447)..(447): Xaa can be any naturally occurring amino acid
  misc_feature (452)..(452): Xaa can be any naturally occurring amino acid
  misc_feature (467)..(467): Xaa can be any naturally occurring amino acid
MGARASVLSGGXLDRWEKIRLRPGGKKKYKLKHIVWASRELERFAVNPGLLETSGGCRKILEQLQPXLQTGSEELKSLYNTVATLYCVHQRIDVKDTKEALDKIEEEQNKSKKKAQQAAADTVNSSQVSQNYPIVQNLQGQMVHQPLSPRTLNAWVKVVEEKAFSPEVIPMFTALSEGATPQDLNTMLNTVGGHQAAMQMLKETINEEAAEWDRLHPVHAGPXAPGQMREPRGSDIAGTTSTLQEQIGWMTNNPPIPVGEIYKRWIILGLNKIVRMYSPTSILDIKQGPKEXFRDYVDRFYKTLRAEQASQDVKNWMTETLLVQNXNPDCKTILKALGPAATLEEMMTACQGVGGPGHKARVLAEAMSHIQNSNTIMMQRGNFRNQRKIVKCFNCGKEGHIAKNCRAPRKRGCWKCGKEGHQMKDCTERQANFLGKIWPSHXGRPGXFLQSXPEPTAPPEESFRSGXGTTTLPQKQEPIDKEQYPLTSLRSLFGNDPLSQ

SEQ ID NO: 628 - protein, 510 aa, Human immunodeficiency virus
  misc_feature (226)..(226): Xaa can be any naturally occurring amino acid
  misc_feature (466)..(466): Xaa can be any naturally occurring amino acid
MGARASVLSAGELDRWERIRLRPGGKKKYRLKHIVWASRELERFAVNPGLLETSEGCKQILGQIQPSLQTGSEELRSLYNTVAVLYCVHQKIEIKDTKEALEKIEKEQNNSQKKVQQVAAGTGNSSQVSQNYPIVQNLQGQMVHQPLTPRTLNAWVKVVEEKAFSPEVIPMFSALSEGATPQDLNTMLNTVGGHQAAMQMLKETINEEAADWDRVHPVQAGPVAPXQIRDPRGSDIAGTTSTLQEQITWMTSNPPIPVGEIYKRWIILGLNKIVRMYSPVSILDIRQGPKEPFRDYVDRFYKTLRAEQASQDVKNWMTETLLVQNANPDCKTILKALGPAASLEEMMTACQGVGGPGHKARVLAEAMSQVTSTSAIMMQKGNYRIQRKTVKCFNCGKEGHIARNCRAPRKKGCWKCGREGHQMKDCTERQANFLGKIWPSHKGRPGNFLQNRPEPSAPAEPSAPPXESFRFGEGTTTPSRGQEPTDKSQEPTDKGLYPLASLRSLFGSDP

SEQ ID NO: 629 - protein, 503 aa, Human immunodeficiency virus
  misc_feature (371)..(371): Xaa can be any naturally occurring amino acid
MGARASVLSGGELDRWEKIRLRPGGKKKYKLKHIVWASRELERFALNPGLLETSEGCRQILEQLQPSLQTGSEEIKSLFNTVATLYCVHQRIEVKDTKEALEKIEEEQAKSKKKAQQAAAANTGNSSQVSQNYPIVQNLQGQMVHQPLSPRTLNAWVKVVEEKAFSPEVIPMFSALSEGATPQDLNTMLNTVGGHQAAMQMLKETINEEAAEWDRLHPVHAGPIAPGQMREPRGSDIAGTTSNLQEQIGWMTHNPPIPVGEIYKRWIILGLNKIVRMYSPTSILDIRQGPKEPFRDYVDRFYKTLRAEQASQEVKNWMTETLLVQNANPDCKTILKALGPAATLEEMMTACQGVGGPGHKARVLAEAMSQXTNSASAAIMMQRGNFKNQRKTVKCFNCGKEGHIARNCRAPRKKGCWKCGREGHQMKDCTERQANFLGKIWPSYKGRPGNFLQSRPEPTAPPEESFRFGEETTAPSQKQETIDKELYPLASLKSLFGNDPSSQ

SEQ ID NO: 630 - protein, 499 aa, Human immunodeficiency virus
  misc_feature (4)..(4): Xaa can be any naturally occurring amino acid
  misc_feature (26)..(26): Xaa can be any naturally occurring amino acid
  misc_feature (30)..(30): Xaa can be any naturally occurring amino acid
  misc_feature (64)..(64): Xaa can be any naturally occurring amino acid
  misc_feature (138)..(138): Xaa can be any naturally occurring amino acid
  misc_feature (147)..(147): Xaa can be any naturally occurring amino acid
  misc_feature (334)..(334): Xaa can be any naturally occurring amino acid
  misc_feature (463)..(463): Xaa can be any naturally occurring amino acid
  misc_feature (476)..(476): Xaa can be any naturally occurring amino acid
  misc_feature (485)..(485): Xaa can be any naturally occurring amino acid
MGAXASVLSGGELDRWEKIRLRPGGXKTYXLKHIVWASRELERFAVNPGLLETAAGCRQILGQXQPSLQTGSEELKSLYNTIATLYCVHQKIEVRDTKEALDKIEEEQNRSKKKAQQAAADKENSSQVSQNYPIVQNXQGQMVHQAXSPRTLNAWVKVVEEKAFSPEVIPMFSALAEGATPQDLNTMLNTVGGHQAAMQMLKETINEEAAEWDRLHPVHAGPIAPGQMREPRGSDIAGTTSSLQEQIGWMTNNPPIPVGEIYKRWIIMGLNKIVRMYSPVSILDIRQGPKEPFRDYVDRFYKTLRAEQASQDVKNWMTETLLVQNANPDCKTIXKALGPAATLEEMMTACQGVGGPGHKARVLAEAMSQVTNPTIMMQRGNYRSTRKTVKCFNCGKEGHIARNCRAPRKKGCWKCGKEGHQMKECTERQANFLGKIWPSHKGRPGNFLQSRPEPTAPPEESFXVREETATPSQKQXTIDKELYPXTSLRSLFGNDPSSQ

SEQ ID NO: 631 - protein, 500 aa, Human immunodeficiency virus
  misc_feature (463)..(463): Xaa can be any naturally occurring amino acid
MGARASVLSGGELDRWEKIRLRPGGNKKYKLKHIVWASRELERFAVNPGLLETAEGCRQILGQLQPALQTGSEELRSLYNTVATLYCVHQKIDIKDTKEALDKIEEEQNKSKKKAQQAAAADTGNNSQVSQNYPIVQNLQGQMVHQAISPRTLNAWVKVVEEKAFSPEVIPMFTALSEGATPQDLNTMLNTVGGHQAAMQMLKETINEEAAEWDRLHPVQAGPIAPGQLREPRGSDIAGTTSNLQEQIGWMTSNPPIPVGEIYKRWIILGLNKIVRMYSPSSILDIKQGPKEPFRDYVDRFYKTLRAEQASQDVKNWMTETLLVQNANPDCKTILKALGPAATLEEMMTACQGVGGPGHKARVLAEAMSQVTNNTNIMMQRGNFRNPRKIAKCFNCGKEGHIARNCRAPRKKGCWKCGKEGHQMKDCTERQANFLGRIWPSHKGRPGNFLQNRTEPTAPPAEXFRFGEETTPSQKQEQTDKDLYPLASLRSLFGNDPSLL

SEQ ID NO: 632 - protein, 499 aa, Human immunodeficiency virus
MGARASVLSGGQLDRWEKIHLRPGGKKRYQLKHIVWASRELERFAINPSLLETSEGCRQILGQLQPSLQTGSEEIKSLFNTVATLYCVHQRIEVKDTKEALDKIEEEQNKSKQAAAAAADTGNSSQVSQNYPIVQNMQGQMVHQPLTPRTLNAWVKVIEEKAFSPEVIPMFSALSEGATPQDLNTMLNTVGGHQAAMQMLKETINEEAAEWDRLHPVHAGPIAPGQMREPRGSDIAGTTSTLQEQIGWMTNNPPIPVGEIYKRWIILGLNKIVRMYSPVSILDIRQGPKEPFRDYVDRFYKTLRAEQATQEVKNWMTETLLVQNANPDCKTILKALGPAATLEEMMTACQGVGGPGHKARVLAEAMSQVTNSATIMMQKGNFKNQRKIVKCFNCGKEGHIARNCRAPRKRGCWKCGKEGHQMKECTERQANFLGKIWPSHKGRPGNFLQSRPEPSAPPAESFGFGEETTTPSQKQEPIDREMYPLSSLKSLFGNDPSSQ

SEQ ID NO: 633 - protein, 503 aa, Human immunodeficiency virus
MGARASVLSGGKLDKWEKIRLRPGGKKRYQLKHIVWASRELERFAVNPALLETSEGCRQIIGQLQPALQTGSEELKSLYNTVAVLYCVHQNIEIKDTKEALDKIEEEQNKSKKKAQQAAADTGNSSQVSQNYPIVQNLQGQMVHQPISPRTLNAWVKVVEEKAFSPEVIPMFSALAEGATPQDLNTMLNTVGGHQAAMQMLKETINEEAAEWDRLHPVPAGPIAPGQMRDPRGSDIAGTTSNLQEQIGWMTGNPPIPVGEIYKRWIILGLNKIVRMYSPTSILDIKQGPKEPFRDYVDRFYKTLRAEQASQDVKNWMTETLLVQNANPDCKTILKALGPAATLEEMMTACQGVGGPSHKARVLAEAMSQATNPNIIMMQRGNFRNQRKIVKCFNCGKEGHIAKNCRAPRKKGCWKCGKDGHQMKDCTERQANFLGKIWPSHKGRPGNFLQSRSEQSRLEPTAPPAPPEESFRFGEATPPQKQEPIDKERYPLTSLRSLFGNDP

SEQ ID NO: 634 - protein, 499 aa, Human immunodeficiency virus
MGARASVLSGGELDKWEKIRLRPGGKKKYKLKHIVWASRELERFAVNPGLLETSDGCRQILGQLQPSLQTGSEELRSLYNTVATLYCVHQRIEVKDTKEALENIEEEQNKSKKKAQPADDTGNSSQVSQNYPVVQNLQGQMVHQPISPRTLNAWVKVVEEKAFSPEVIPMFTALSEGATPQDLNTMLNTVGGHQAAMQMLKETINEEAAEWDRLHPVHAGPIAPDQMREPRGSDIAGITSTLQEQIGWMTNNPPIPVGEIYKRWIILGLNKIVRMYSPTSILDIRQGPKEPFRDYVDRFYKTLRAEQASQDVKNWMTETLLVQNANPDCKTILKALGPAATLEEMMTACQGVGGPGHKARVLAEAMSQVTNSATIMMQRGNFRNQRKIVKCFNCGKEGHITKNCRAPRKKGCWKCGKEGHQMKDCTERQANFLGKIWPSKKGRPGNFLQSRPEPTAPPAESFRFGEETTTPSQKQEPTDKELYPLASLRSLFGNDPSSQ

SEQ ID NO: 635 - protein, 504 aa, Human immunodeficiency virus
  misc_feature (327)..(327): Xaa can be any naturally occurring amino acid
  misc_feature (392)..(392): Xaa can be any naturally occurring amino acid
  misc_feature (405)..(405): Xaa can be any naturally occurring amino acid
  misc_feature (413)..(413): Xaa can be any naturally occurring amino acid
  misc_feature (416)..(416): Xaa can be any naturally occurring amino acid
MGARASILSGGKLDRWEKIRLRPGGKKSYKLKHLVWASRELERFAVNPGLLETSEGCRQILGQLQPSLQTGSEELKSLFNTIATLYCVHQGIDVKDTKEALDKIEEEQNKSKKKAQQAAADAGENKLVSQNFPIVQNLQGQMVHQAISPRTLNAWVKVVEEKAFSPEVIPMFSALSEGATPQDLNTMLNTVGGHQAAMQMLKETINEEAAEWDRLHPVHAGPIAPGQMREPRGSDIAGTTSTLQEQIGWMTHNPPIPVGEIYKRWIILGLNKIVRMYSPTSILDIRQGPKEPFRDYVDRFYKTLRAEQASQEVKNWMTETLLVQNAXPDCKTILKALGPAATLEEMMTACQGVGGPGHKARVLAEAMSQVTNSAAVMMQRGNFRNQRKAVKXFNCGKEGHIARNXRAPRKKGXWKXGKEGHQMKDCTERQANFLGKIWPSHKGRPGNFLQSRPESRPEPTAPPEESFSFGEETGIPSQKQGTIDKELYPLTSLRSLFGNDPSSQ

SEQ ID NO: 636 - protein, 498 aa, Human immunodeficiency virus
  misc_feature (45)..(45): Xaa can be any naturally occurring amino acid
  misc_feature (103)..(103): Xaa can be any naturally occurring amino acid
  misc_feature (115)..(115): Xaa can be any naturally occurring amino acid
  misc_feature (306)..(306): Xaa can be any naturally occurring amino acid
  misc_feature (389)..(389): Xaa can be any naturally occurring amino acid
  misc_feature (397)..(397): Xaa can be any naturally occurring amino acid
  misc_feature (404)..(404): Xaa can be any naturally occurring amino acid
  misc_feature (407)..(407): Xaa can be any naturally occurring amino acid
  misc_feature (467)..(467): Xaa can be any naturally occurring amino acid
  misc_feature (487)..(487): Xaa can be any naturally occurring amino acid
MGARASVLSGGELDKWEKIQLRPGGKKRYKLKHIVWASRELERFXVNPGLLETSGGCRQILEQLEPALKTGSEELKSLYNTVATLYCVHQKIEVRDTKEALDXIEEERNKSKKKXQQAAADAGNNSSQVSQNYPIVQNIQGQMVHQAISPRTLNAWVKVVEEKAFSPEVIPMFSALSEGATPQDLNTMLNTVGGHQAAMQMLKETINEEAAEWDRVHPVHAGPVAPGQMREPRGSDIAGTTSTLQEQIGWMTNNPPIPVGEIYKRWIILGLNKIVRMYSPTSILDIKQGPKEPFRDYVDRFYKTLXAEQASQEVKNWMTETLLVQNANPDCKTILKALGPAATLEEMMTACQGVGGPGHKARVLAEAMSQVTNATTIMMQKGNYRNQRXTVKCFNCXKEGHIAXNCXAPRKKGCWKCGQEGHQMKDCTGRQANFLGKIWPSHKGRPGNFLQSRPEPTAPPEESFRFXEETTTPPQKQEPRDRELYPXASLRSLFGNDP

SEQ ID NO: 637 - protein, 500 aa, Human immunodeficiency virus
  misc_feature (26)..(26): Xaa can be any naturally occurring amino acid
  misc_feature (57)..(57): Xaa can be any naturally occurring amino acid
  misc_feature (67)..(67): Xaa can be any naturally occurring amino acid
  misc_feature (128)..(128): Xaa can be any naturally occurring amino acid
  misc_feature (140)..(140): Xaa can be any naturally occurring amino acid
  misc_feature (227)..(227): Xaa can be any naturally occurring amino acid
  misc_feature (280)..(280): Xaa can be any naturally occurring amino acid
  misc_feature (423)..(423): Xaa can be any naturally occurring amino acid
  misc_feature (427)..(427): Xaa can be any naturally occurring amino acid
MGARASVLSAGELDRWEKIRLRPGGXKKYRLKHIVWASRELERFAVNPGLLETSEGXRQILGQLQPXLQTGSEELRSLFNTVAVLYCVHQKIEVKDTKEALDKIEEEQNKSKKKAQQAVADTGNSNQXSQNYPIVQNMQXQMVHQALSPRTLNAWVKVVEEKAFSPEVIPMFTALSEGATPQDLNTMLNTVGGHQAAMQMLKETINEEAAEWDRLHPVQAGPVAPGXMREPRGSDIAGTTSTLQEQIGWMTNNPPIPVGEIYKRWIIMGLNKIVRMYSPXSILDIKQGPKEPFRDYVDRFYKTLRAEQASQEVKNWMTDTLLIQNSNPDCKTILKALGPAATLEEMMTACQGVGGPSHKARVLAEAMSQVTHPPTIMVQNGKFRNQRKTVKCFNCGKEGHIARNCRAPRKKGCWKCGKEGHQXKDCXERQANFLGRIWPSHKGRPGNFVQSRPEPTAPPEESFRFGEETTTPSQKQEPTDKELYPLASLKSLFGNDPSCQ

SEQ ID NO: 638 - protein, 501 aa, Human immunodeficiency virus
MGARASVLSGGELDKWEKIRLRPGGKKKYQLKHIIWASRELERFAVNPGLLETSEGCRQILGQLQSSLQTGSEELRSLYNTVATLYCVHQKIEVKDTKEALEKIEEEQNKSKKKAQQAVAAAGTGNSSQVSQNFPIVQNLQGQMVHQALSPRTLNAWVKVVEEKAFSPEVIPMFTALSEGVTPQDLNTMLNTVGGHQAAMQMLKETINEEAAEWDRLHPVHAGPVAPGQMREPRGSDIAGTTSNLQEQVAWMTSNPPIPVGEIYKRWIILGLNKIVRMYSPTSILDIKQGPKEPFRDYVDRFYKTLRAEQASQEVKNWMTETLLVQNSNPDCKTILKALGPGATLEDMMTACQGVGGPGHKARVLAEAMSQANSASIMMQRGNFRNQRKTVKCFNCGKEGHIAKNCRAPRKKGCWKCGKEGHQMKDCTERQVNFLGKIWPSHKGRPGNFLQSRPEPTAPPAESFRFGEETKTPPQKQEPTDKELYPLASLKSLFGNDPSSQ

SEQ ID NO: 639 - protein, 498 aa, Human immunodeficiency virus
  misc_feature (21)..(21): Xaa can be any naturally occurring amino acid
  misc_feature (46)..(46): Xaa can be any naturally occurring amino acid
  misc_feature (61)..(61): Xaa can be any naturally occurring amino acid
  misc_feature (63)..(63): Xaa can be any naturally occurring amino acid
  misc_feature (67)..(67): Xaa can be any naturally occurring amino acid
  misc_feature (80)..(80): Xaa can be any naturally occurring amino acid
  misc_feature (84)..(84): Xaa can be any naturally occurring amino acid
  misc_feature (91)..(91): Xaa can be any naturally occurring amino acid
  misc_feature (133)..(133): Xaa can be any naturally occurring amino acid
  misc_feature (164)..(164): Xaa can be any naturally occurring amino acid
  misc_feature (170)..(170): Xaa can be any naturally occurring amino acid
  misc_feature (238)..(238): Xaa can be any naturally occurring amino acid
  misc_feature (448)..(448): Xaa can be any naturally occurring amino acid
  misc_feature (451)..(451): Xaa can be any naturally occurring amino acid
  misc_feature (461)..(461): Xaa can be any naturally occurring amino acid
  misc_feature (465)..(465): Xaa can be any naturally occurring amino acid
MGARASVLSPGELDKWEGIRXRPGGKKKYRLKHIVWASRELERFAXNPGLLETAGGCKQIXEXLLPXLQTGSEGFRSLYXTVAXLYCVHKXIEIRDTKEALDKIEEEQNNSKKRAQQAAAGTGNSSQVSQNYXIVQNLQGQMVHQPISPRTLNAWVKVVEEKAXSPEVIXMFTALSEGATPQDLNTMLNTVGGHQAAMQMLKETINEEAAEWDRLHPAQAGPIAPGQIRDPRGSDIAXTTSTLQEQITWMTANPAIPVGEIYKRWIILGLNKIVRMYSPTSILDIRQGPKEPFRDYVDRFYKTLRAEQASQDVKNWMTETLLVQNANPDCRTILKALGPAATLEEMMTACQGVGGPGHKARILAEAMSQVTNSANTTIMMQKGNFRKTIKCFNCGKEGHLARNCRAPRKKGCWKCGKEGHQMKDCTERQRQANFLGKIWPSHKGRPGXFLXSRPEPTAPPXESFXFQEETTTPPRKQEPIDKDQYPLASLKSLFGNDP

SEQ ID NO: 640 - protein, 498 aa, Human immunodeficiency virus
  misc_feature (88)..(88): Xaa can be any naturally occurring amino acid
  misc_feature (374)..(374): Xaa can be any naturally occurring amino acid
MGARASVLSGGKLDKWEKIRLRPGGKKKYQLKHIVWASRELERFAVNPGLLETSEGCRQILGQLQPALQTGSEDFRSLYNTIATLYCXHQNIDIKDTKEALDKIEEEQNKSKKRAQQAAADAGNKSQISQNYPIVQNIQGQMVHQAISPRTLNAWVKVVEEKAFSPEVIPMFTALSEGATPQDLNTMLNTVGGHQAAMQMLKETINEEAAEWDRLHPVHAGPVAPGQMREPRGSDIAGTTSTLQEQIGWMTNNPPIPVGEIYKRWIILGLNKIVRMYSPASILDIKQGPKEPFRDYVDRFYKTLRAEQASQEVKNWMTETLLVQNANPDCKTILKALGPAASLEEMMTACQGVGGPSHKARVLAEAMSQVTNTXTVMMQKGNFKNQRKIVKCFNCGKEGHIAKNCRAPRKRGCWKCGKEGHQMKDCTERQANFLGKIWPSHKGRPGNFLQSRPEPSAPPEEIFRFGEETTTPSQKQIDKEQCPLASLKSLFGNDPLSQ

SEQ ID NO: 641 - protein, 505 aa, Human immunodeficiency virus
  misc_feature (133)..(133): Xaa can be any naturally occurring amino acid
  misc_feature (175)..(175): Xaa can be any naturally occurring amino acid
  misc_feature (189)..(189): Xaa can be any naturally occurring amino acid
  misc_feature (271)..(271): Xaa can be any naturally occurring amino acid
  misc_feature (303)..(303): Xaa can be any naturally occurring amino acid
MGARASVLSGGGLDRWKKIRLRPGGKKKYKLKHIVWASRELERFAVNPGLLETSEGCRQILEQLQPSLQTGSEELKSLYNTIAVLYCVHQKIDVKDTKEALDKIEEEQSKSKKKKAQQAAAAADTGNSSQVSXNYPIVQNIQGQMVHQALSPRTLNAWVKVVEEKAFSPEVIPMXTALSEGATPQDLNXMLNTVGGHQAAMQMLKETINEEAAEWDRLHPVHAGPIAPGQMREPRGSDIAGTTSTLQEQIGWMTNNPPIPVGEIYKRWIIXGLNKIVRMYSPSSILDIKQGPKEPFRDYVDRXYKTLRAEQASQEVKNWMTETLLVQNSNPDCKTILKALGPAATLEEMMTACQGVGGPGHKARVLAEAMSQVTNSATIMMQKGNFRSHRKPVKCFNCGKEGHIARNCRAPRKRGCWKCGKEGHQMKDCTERQANFLGKIWPSHKGRPGNFLQSRPEPTAPPEESFRSGEGTATPAQKQELIDLDKEMYPLTSLRSLFGNDPSSK

SEQ ID NO: 642 - protein, 500 aa, Human immunodeficiency virus
  misc_feature (28)..(28): Xaa can be any naturally occurring amino acid
MGARASVLSGGELDRWEKIRLRPGGKKXYKLKHLVWASRELERFAVNPALLETSEGCRQILGQLQPALQTGSEELKSLYNTVATLYCVHQRIDVKDTKEALDKIEEEQNKSKKRAQQAAADTGNSNQVSQNYPIVQNLQGQMTHQAISPRTLNAWVKVVEEKAFSPEVIPMFSALSEGATPQDLNTMLNTVGGHQAAMQMLKETINEEAAEWDRLHPVHAGPIAPGQMRDPRGSDIAGTTSTLQEQIGWMTNNPPIPVGEIYKRWIILGLNKIVRMYSPASILDIKQGPKESFRDYVDRFYKTLRAEQGSQEVKNWMTETLLVQNANPDCKTILKALGPGATLEEMMTACQGVGGPSHKARILAEAMSQVTNPANIMMQRGNFRNQRRIIKCFNCGKEGHIAKNCRAPRKKGCWKCGGEGHQMKDCTERQANFLGKIWPSHKGRPGNFLQSRPEPSAPPEESFMFGEETAAPSQKQEPIDKEKYPLASLRSLFGNDPLSQ

SEQ ID NO: 643 - protein, 500 aa, Human immunodeficiency virus
  misc_feature (66)..(66): Xaa can be any naturally occurring amino acid
  misc_feature (103)..(103): Xaa can be any naturally occurring amino acid
  misc_feature (124)..(124): Xaa can be any naturally occurring amino acid
  misc_feature (135)..(135): Xaa can be any naturally occurring amino acid
  misc_feature (159)..(159): Xaa can be any naturally occurring amino acid
  misc_feature (257)..(257): Xaa can be any naturally occurring amino acid
  misc_feature (259)..(259): Xaa can be any naturally occurring amino acid
  misc_feature (263)..(263): Xaa can be any naturally occurring amino acid
  misc_feature (268)..(268): Xaa can be any naturally occurring amino acid
  misc_feature (274)..(274): Xaa can be any naturally occurring amino acid
  misc_feature (290)..(290): Xaa can be any naturally occurring amino acid
  misc_feature (312)..(312): Xaa can be any naturally occurring amino acid
  misc_feature (322)..(322): Xaa can be any naturally occurring amino acid
  misc_feature (381)..(381): Xaa can be any naturally occurring amino acid
  misc_feature (383)..(383): Xaa can be any naturally occurring amino acid
  misc_feature (470)..(470): Xaa can be any naturally occurring amino acid
MGARASVLSGGKLDRWEKIQLRPGGKKRYKLKHIVWASRELERFALNPGLLETSEGCRQILGQLQXSLQTGSEELKSLFNAVAVLYCVHQNIEIRDTKEALDXIEEEQNKSKKKAQQAAADTGXSSNVSQNYPIXQNMQGQMVHQAISPRTLNAWVKVXEEKAFSPEVIPMFSALSEGATPQDLNTMLNTVGGHQAAMQMLKETINEEAAEWDRLHPVHAGPIAPGQMREPRGSDIAGTTSTLQEQIGWMTNNPPIXVXEIYXRWIIXGLNKIXRMYSPISILDIRQGPXEPFRDYVDRFYKTLRAEQASQXVKNWMTETLXVQNANPDCKTILKALGPAATLEEMMTACQGVGGPGHKARVLAEAMSQVTNSTNIMMQRXSXRSQRKTVKCFNCGKEGHIARNCRAPRKKGCWKCGREGHQMKECTERQANFLGKIWPSNKGRPGNFPQSRLEPTAPPEESFRFGEETXTPSQKQEPKDKELYPLASLRSLFGNDPSSQ

SEQ ID NO: 644 - protein, 501 aa, Human immunodeficiency virus
  misc_feature (326)..(326): Xaa can be any naturally occurring amino acid
  misc_feature (363)..(363): Xaa can be any naturally occurring amino acid
  misc_feature (371)..(371): Xaa can be any naturally occurring amino acid
MGARASVLSGGELDRWEKIRLRPGGKKKYKLKHIVWASRELERFAINPGLLETAEGCRQILEQLQPALQTASEEVKSLNNAIAVLYCVHQRIDVKDTKEALEKIEEEQNKSKKRAQQAAAATGNNSQSSQGSQNYPIVQNIQGQMVHQAISPRTLNAWVKVIEEKAFSPEVIPMFSALSEGATPQDLNTMLNTVGGHQAAMQMLKETINEEAAEWDRMHPVHAGPIAPGQMREPRGSDIAGTTSTLQEQIGWMTSNPPIPVGEIYKRWIILGLNKIVRMYSPVSILDIRQGPKEPFRDYVDRFYKTLRAEQASQDVKNWMTETLLXQNANPDCKTILKALGPAATLEEMMTACQGVGGPGHKXRVLAEAMXHVTNSTNIMMQRGNFRNQRKAVKCFNCGKEGHIARNCKAPRKKGCWKCGREGHQMKDCTERQANFLGKIWPSSKGRPGNFLQSRPEPTAPPAESFREEATTPPQRSEPIDKEMYPLASLKSLFGNDPSSQ

SEQ ID NO: 645 - protein, 500 aa, Human immunodeficiency virus
  misc_feature (73)..(73): Xaa can be any naturally occurring amino acid
MGARASVLSGGDLDRWEKIRLRPGGKKQYKLKHIVWASRELERFAVNPGLLETAEGCRQILGQLQPSLQTGSXELRSLFNTIATLYCVHQKIEVKDTKEALEKIEEEQNKSKKKAQQAAAGTGNSSQTSQNYPIVQNLQGQMVHQAISPRTLNAWVKVIEEKAFSPEVIPMFSALSEGATPQDLNTMLNTVGGHQAAMQMLKETINEEAAEWDRLHPVHAGPIAPGQMREPRGSDIAGTTSTLQEQIGWMTNNPPIPVGEIYKRWIILGLNKIVRMYSPTSILDIRQGPKEPFRDYVDRFYKTLRAEQASQEVKNWMTETLLVQNANPDCKTILKALGPGATLEEMMTACQGVGGPSHKARVLAEAMNQVTTSATIMMQKGNFRNQRKTVKCFNCGKEGHIARNCRAPRKKGCWKCGKEGHQMKDCTERQANFLGKIWPSHKGRPGNFLQSRPEPTAPPEESFRFGEETTAPSQKQEPIDKEQYPLASLRSLFGNDPSSQ

SEQ ID NO: 646 - protein, 498 aa, Human immunodeficiency virus
  misc_feature (8)..(8): Xaa can be any naturally occurring amino acid
  misc_feature (21)..(21): Xaa can be any naturally occurring amino acid
  misc_feature (55)..(55): Xaa can be any naturally occurring amino acid
  misc_feature (102)..(102): Xaa can be any naturally occurring amino acid
  misc_feature (110)..(110): Xaa can be any naturally occurring amino acid
  misc_feature (127)..(127): Xaa can be any naturally occurring amino acid
  misc_feature (154)..(154): Xaa can be any naturally occurring amino acid
  misc_feature (205)..(205): Xaa can be any naturally occurring amino acid
  misc_feature (298)..(298): Xaa can be any naturally occurring amino acid
  misc_feature (344)..(344): Xaa can be any naturally occurring amino acid
  misc_feature (383)..(383): Xaa can be any naturally occurring amino acid
  misc_feature (392)..(392): Xaa can be any naturally occurring amino acid
  misc_feature (471)..(471): Xaa can be any naturally occurring amino acid
  misc_feature (481)..(481): Xaa can be any naturally occurring amino acid
MGARASIXSGGELDRWEKIRXRPGGNKKYKLKHIVWASRELERFAVNPGLLETSXGCRQILVQLQPSLQTGSEELKSLYNTIAVLYCVHQRIEVKDTREALXKVEEEQNXSKKKAQQAAADTGSNSXVSQNYPIVQNLQGQAVHQAISPRTLNXWVKVVEEKAFSPEVIPMFSALSEGATPQDLNTMLNTVGGHQAAMQMLKETXNEEAAEWDRLHPVHAGPIAPGQIREPRGSDIAGTTSTLQEQIAWMTNNPPIPVGEIYKRWIILGLNKIVRMYSPSSILDIKQGPKEPFRDYVXRFYKTLRAEQASQEVKNWMTETLLVQNANPDCKTILKALGPAATLXEMMTACQGVGGPGHKARVLAEAMSQVTNSATIMQQGNYXNQRKPVKCXNCGKAGHIAKNCRAPRKKGCWKCGKEGHQMKDCTERQANFLGKIWPSYKGRPGNFLQSRPEPSAPPEESFRFGEETTPXQKQEQIDKEXHPLTSLRSLFGSDPSSQ

SEQ ID NO: 647 - protein, 500 aa, Human immunodeficiency virus
  misc_feature (110)..(110): Xaa can be any naturally occurring amino acid
  misc_feature (137)..(137): Xaa can be any naturally occurring amino acid
  misc_feature (151)..(151): Xaa can be any naturally occurring amino acid
MGARASVLSGGKLDAWEKIRLRPGGKKKYRLKHIVWASRELERFAVNPGLLETSEGCRQILGQLQPSLQTGSEELKSLYNTIAVLYCVHQRIEIKDTKEALDKIEEEQNXSKKKAQHAAADTGNNNSQVSQNYPIVXNAQGQLVHQAMSPXTLNAWVKVVEEKAFSPEVIPMFSALSEGATPQDLNTMLNTVGGHQAAMQMLKETINEEAAEWDRLHPVQAGPVAPGQIREPRGSDIAGTTSNLQEQIAWMTHNPPIPVGEIYKRWIILGLNKIVRMYSPVSILDIRQGPKEPFRDYVDRFYKTLRAEQASQDVKNWMTETLLVQNANPDCKTILKALGPAATLEEMMTACQGVGGPGHKARVLAEAMSQVTPTTVMMQKGNFRSQRRTVKCFNCGKDGHIAKNCRAPRKRGCWKCGKEGHQMKDCTERQANFLGKIWPSHKGRPGNFLQNRPEPSAPPEESFRFGEETTTPSQKQEPIDKELYPTASLRSLFGNDPLSQ

SEQ ID NO: 648 - protein, 503 aa, Human immunodeficiency virus
MGARASILSGGDLDRWERIRLRPGGKKKYQLKHLVWASRELERFAVNPGLLETPEGCRQILSQLQPALQTGSEGFRSLYNAISVLYCVHQRIEVKDTKEALDKIEEEQNKCKKKAQQAAADTGNSSQVSQNYPIVQNIQGQMVHQPISPRTLNAWVKVVEEKAFSPEVIPMFSALSEGATPQDLNTMLNTVGGHQAAMQMLKEVINEEAAEWDRLHPAQAGPVAPGQMRDPRGSDIAGTTSTLQEQIGWMTHNPPIPVGEIYKRWIILGLNKIVRMYSPSSILDIKQGPKEPFRDYVDRFYKTLRAEQASQEVKNWMTETLLVQNSNPDCKTILKALGPAATLEEMMTACQGVGGPSHKARILAEAMSQVTNSATIMMQKGNFRGPRKIIKCFNCGKEGHLAKNCRAPRKRGCWKCGKEGHQMKDCTERQANFLGKIWPSHKGRPGNFLQSRPEPTAPPAPPEESFRFGGETTTPSQKQEQIDKDLYPLDSLRSLFGNDPSSQ

SEQ ID NO: 649 - protein, 500 aa, Human immunodeficiency virus
  misc_feature (215)..(215): Xaa can be any naturally occurring amino acid
  misc_feature (227)..(227): Xaa can be any naturally occurring amino acid
  misc_feature (453)..(453): Xaa can be any naturally occurring amino acid
MGARASVLSGGELDRWEKIRLRPGGKKQYKLKHIVWASRELERFAVNPGLLETSEGCRQILKQLQPSLQTGSEELKSLFNTVATLYCVHQRIDVKDTKEALDKIEEEQNKSKKKAQQAAADTGANNQVSQNYPIVQNLQGQMVHQAISPRTLNAWVKVVEEKAFSPEVIPMFSALSEGATPQDLNTMLNTVGGHQAAMQMLKETINEEAAEWDRXHPVHAGPIAPGXMREPRGSDIAGTTSTLQEQIGWMTNNPPIPVGEIYKRWIILGLNKIVRMYSPTSILDIRQGPKEPFRDYVDRFYKTLRAEQASQDVKNWMTETLLVQNANPDCKTILKALGPGATLEEMMTACQGVGGPGHKARVLAEAMSQVTGPANIMMQRGNFRNQGKTVKCFNCGKEGHIARNCRAPRKKGCWKCGREGHQMKDCTERQANFLGKIWPSHKGRPGNFLQNRXEPSAPPEESFRFGEETATPPQRQEPINKELYPLASLKSLFGNDPSSQ

SEQ ID NO: 650 - protein, 500 aa, Human immunodeficiency virus
  misc_feature (280)..(280): Xaa can be any naturally occurring amino acid
  misc_feature (372)..(372): Xaa can be any naturally occurring amino acid
  misc_feature (499)..(499): Xaa can be any naturally occurring amino acid
MGARASVLSGGELDRWEKIRLRPGGKKKYRLKHIVWASRELERFAVNPGLLETAAGCRQILGQLQPALQTGSEEFKSLYNTIATLYCVHQKIDIRDTKEALDKIEEEQNKSKKKAQQTAADTGNSNQVSQNYPIVQNLQGQMVHQPLSPRTLNAWVKVVEEKAFSPEVIPMFSALSEGATPQDLNTMLNTVGGHQAAMQMLKEAINEEAAEWDRLHPVHAGPIAPGQMREPRGSDIAGTTSTLQEQIGWMTNNPPIPVGEIYKRWIILGLNKIVRMYSPXSILDIRQGPKEPFRDYVDRFYKTLRAEQASQEVKNWMTETLLVQNANPDCKTILKALGPAATLEEMMTACQGVGGPGHKARVLAEAMSQVTXPATIMMQKGKFRNQRKIVKCFNCGKEGHIAKNCRAPRKKGCWKCGKEGHQMKDCTERQANFLGKIWPSHKGRPGNFLQSRPEPTAPPEESFRFGEETTTPPQKQEPIDKELYPLASLKSLFGNDPSXQ

SEQ ID NO: 651 - protein, 503 aa, Human immunodeficiency virus
  misc_feature (12)..(12): Xaa can be any naturally occurring amino acid
  misc_feature (34)..(34): Xaa can be any naturally occurring amino acid
  misc_feature (42)..(42): Xaa can be any naturally occurring amino acid
  misc_feature (49)..(49): Xaa can be any naturally occurring amino acid
  misc_feature (51)..(51): Xaa can be any naturally occurring amino acid
  misc_feature (65)..(65): Xaa can be any naturally occurring amino acid
  misc_feature (114)..(114): Xaa can be any naturally occurring amino acid
  misc_feature (131)..(131): Xaa can be any naturally occurring amino acid
  misc_feature (176)..(176): Xaa can be any naturally occurring amino acid
  misc_feature (194)..(194): Xaa can be any naturally occurring amino acid
  misc_feature (198)..(198): Xaa can be any naturally occurring amino acid
  misc_feature (203)..(203): Xaa can be any naturally occurring amino acid
  misc_feature (302)..(302): Xaa can be any naturally occurring amino acid
  misc_feature (320)..(320): Xaa can be any naturally occurring amino acid
  misc_feature (359)..(359): Xaa can be any naturally occurring amino acid
  misc_feature (409)..(409): Xaa can be any naturally occurring amino acid
  misc_feature (441)..(441): Xaa can be any naturally occurring amino acid
  misc_feature (448)..(448): Xaa can be any naturally occurring amino acid
MGARASVLSGGXLDTWEKIRLRPGSKKKYQLKHXVWASRELXRFAVNPXLXETSEGCRQIMRQLXPSLQTGSEELKSLYNTIAVLYCVHQRIEIRDTKEALDKIEEEKSKKKAXQQAAADTESSKQVSQNXPIVQNLQGQMVHQAISPRTLNAWVKVVEEKAFSPEVIPMFSALAXGATPGDLNTMLNTVGGHXAAMXMLKEXINEEAAEWDRLHPVQAGPVAPGQIREPRGSDIAGTTSTLQEQIAWMTNNPPIPVGDIYKRWIIIGLNKIVRMYSPTSILDIKQGPKEPFRDYVDRFYKXLRAEQASQEVKNWMTETXLVQNANPDCKSILKALGPGATLEEMMTACQGVGGPSHKXRVLAEAMSQANSAAIMMQKGNFRNQRKTVKCFNCGKEGHLARNCRAPRKXGCWKCGQEGHQMKDCTERQANFLGKFWPSHKXRPGNFLXSRPEQSRPEPSAPPEESFRFGEETTTPPQKQEPRDKELYPLASLKSLFGNDPSSQ

SEQ ID NO: 652 - protein, 500 aa, Human immunodeficiency virus
  misc_feature (15)..(15): Xaa can be any naturally occurring amino acid
  misc_feature (103)..(103): Xaa can be any naturally occurring amino acid
  misc_feature (115)..(115): Xaa can be any naturally occurring amino acid
  misc_feature (213)..(213): Xaa can be any naturally occurring amino acid
  misc_feature (312)..(312): Xaa can be any naturally occurring amino acid
  misc_feature (320)..(320): Xaa can be any naturally occurring amino acid
  misc_feature (326)..(326): Xaa can be any naturally occurring amino acid
  misc_feature (332)..(332): Xaa can be any naturally occurring amino acid
  misc_feature (479)..(479): Xaa can be any naturally occurring amino acid
MGARASVLSGGELDXWEKIRLRPGGKKRYKLKHIVWASRELERFAVNPGLLETSEGCRQIIGQLQPSLQTGSEELKSLFNTVAVLYCVHQRIEIKDTKEALDXIEEEQNKSKKKXQQAAADTGDRGQVSQNYPIVQNLQGQMVHQAISPRTLNAWVKVVEEKAFSPEVIPMFSALSEGATPQDLNTMLNTVGGHQAAMQMLKETINEEAAEWXRLHPVHAGPIAPGQMREPRGSDIAGTTSTLQEQVAWMTNNPPIPVGEIYKRWIIIGLNKVVKMYSPISILDIRQGPKEPFRDYVDRFYKTLRAEQATQXVKNWMTEXLLVQNXNPDCKXILKALGPGATLEEMMSACQGVGGPSHKARILAEAMSQVAQPATIMMQKGNFRSQRKPVKCFNCGKEGHIAKNCRAPRKRGCWKCGREGHQMKECTERQANFLGKIWPSHKGRPGNFPQSRTEPSAPPEESFRFGEETTTPSQKKETXDKELYPLASLKSLFGNDPSSQ

SEQ ID NO: 653 - protein, 502 aa, Human immunodeficiency virus
  misc_feature (143)..(143): Xaa can be any naturally occurring amino acid
  misc_feature (395)..(395): Xaa can be any naturally occurring amino acid
  misc_feature (444)..(444): Xaa can be any naturally occurring amino acid
  misc_feature (460)..(460): Xaa can be any naturally occurring amino acid
  misc_feature (489)..(489): Xaa can be any naturally occurring amino acid
  misc_feature (501)..(501): Xaa can be any naturally occurring amino acid
MGARASVLSGGELDRWEKIRLRPGGKKKYQLKHIVWASREEERFAINPGLLETSAGCKQILIQLQPSLQNGSEELKSLYNTVATLYCVHQKIDVKDTKEALDKIEEEQNKSKKKAQQAAADTGNSSQVSQNYPIVQNMQGQMXHQALSPRTLNAWVKVIEEKAFSPEVIPMFTALSEGATPQDLNTMLNTVGGHQAAMQMLKETINEEAAEWDRLHPVHAGPVAPGQMREPRGSDIAGTTSNLQEQVAWMTSNPPIPVGEIYKRWIILGLNKIVRMYSPVSILDIKQGPKEPFRDYVDRFYKTLRAEQATQEVKNWMTETLLVQNSNPDCKTILKALGPAATLEEMMTACQGVGGPGHKARVLAEAMSQVTNSTNIMMQKGNFRNQRKTVKCFNXGKEGHIARNCRAPRKKGCWKCGREGHQMKDCTERQANFLGKVWPSHKGXPGNFLQSRPEPTAPPXESFKFVKETTTPPQEQNLIDLDKEVYPLXSLRSLFGNDPSXK

SEQ ID NO: 654 - protein, 495 aa, Human immunodeficiency virus
  misc_feature (426)..(426): Xaa can be any naturally occurring amino acid
MGARASVLSGGELDKWEKIRLRPGGKKKYKLKHIVWASRELERFAVNPGLLETSEGCRQILGQLQPSLQTGSEELRSLFNTVAVLYCVHQKIEVKDTKEALEKIEEEQNKCKKKAQQAAAGTGNSNQASQNYPIVQNLQGQMVHQALSPRTLNAWVKVIEEKAFSPEVIPMFSALSEGATPQDLNTMLNTVGGHQAAMQMLKETINEEAAEWDRLHPPQAGPVAPGQMRDPRGSDIAGTTSTLQEQIGWMTSNPPIPVGEIYKRWIILGLNKIVRMYSPVSILDIRQGPKEPFRDYVDRFYKTLRAEQASQEVKNWMTETLLVQNANPDCKTILKALGPAATLEEMMTACQGVGGPGHKARVLAEAMSQVNSGAAMMQRGNFRNQRKTVKCFNCGKEGHIARNCKAPRKKGCWKCGREGHQMKDCXERQANFLGKIWPSHKGRPGNFLQSRPEPSAPPEESFRFVEETTTPSQKPEELYPLASLKSLFGNDPSSQ

SEQ ID NO: 655 - protein, 501 aa, Human immunodeficiency virus
MGARASVLSGGELDRWEKIRLRPGGRKQYKLKHIVWASRELERFAINPGLLESSGGCKQILAQLQPALKTGSEELKSLFNTVATLYCVHQRIDVKDTKEALDKIEEEQNKCQKKAQQAATDTGNSSSNQVSRNYPIVQNLQGQMVHQAISPRTLNAWVKVIEEKAFSPEVIPMFSALSEGATPQDLNTMLNTVGGHQAAMQMLKETINEEAAEWDRLHPAQAGPIAPGQIREPRGSDIAGTTSTLQEQITWMTNNPPIPVGEIYKRWIILGLNKIVRMYSPISILDIRQGPKEPFRDYVDRFYKTLRAEQATQEVKNWMTETLLVQNANPDCKTILKALGPAATLEEMMTACQGVGGPGHKARVLAEAMSQVNPNNVMMQRGNFRNQRKIVKCFNCGKEGHIARNCKAPRKKGCWKCGKEGHQMKDCAERQANFLGKIWPSHKGRPGNFPQSRPEPTAPPAECFGFGEETTTPSQKQEPTDKELYPLASLKSLFGNDPSSQ

SEQ ID NO: 656 - protein, 502 aa, Human immunodeficiency virus
  misc_feature (394)..(394): Xaa can be any naturally occurring amino acid
  misc_feature (437)..(437): Xaa can be any naturally occurring amino acid
MGARASVLSGGELDKWERIRLRPGGKKKYRLKHIVWASRELERFAVNPGLLETAGGCRQILGQLQPSLQTGSEELRSLFNTVAVLYCVHQKIEIKDTKEALDKIEEEQNKSKKKAQQATADTGNNNQVSQNYPIVQNLQGQMVHQPISPRTLNAWVKVVEEKAFSPEVIPMFSALSEGATPQDLNTMLNTVGGHQAAMQMLKETINEEAADWDRLHPVHAGPIAPGQMREPRGSDIAGTTSTLQEQIGWMTNNPPIPVGEIYKRWIILGLNKIVRMYSPSSILDIRQGPKEPFRDYVDRFYKTLRAEQASQEVKNWMTETLLVQNANPDCKTILKALGPAATLEEMMTACQGVGGPGHKARVLAEAMSQVNSATVMMQRGNFRNPRKTVKCFNXGKEGHIARNCRAPRKKGCWKCGKEGHQMRDCTERQANFLGKIXPSHKGRPGNFLQNRPEPTAPSAPPEESFRFGEGTTAPSQKQEPIDKELYPLASLRSLFGSDPSSQ

SEQ ID NO: 657 - protein, 508 aa, Human immunodeficiency virus
  misc_feature (399)..(399): Xaa can be any naturally occurring amino acid
MGARASILSAGELDRWEKIRLRPGGKKKYRLKHLVWASRELERFAVNPGLLETSGGCRQILEQLQPSLQTGSEELKSIYNTVATLYCVHQKIDVKDTKEALDKIEEEQNKSKKKTQQAAAGTGNSSQVSQNYPIVQNLQGQMVHQAISPRTLNAWVKVVEEKAFSPEVIPMFSALSEGATPQDLNTMLNTVGGHQAAMQMLKDTINEEAAEWDRLHPVHAGPIAPGQMREPRGSDIAGTTSTLQEQIGWMTNNPPIPVGEIYKRWIIMGLNKIVRMYSPTSILDIKQGPKEPFRDYVDRFYKTLRAEQASQDVKNWMTETLLVQNANPDCKTILKALGPAATLEEMMTACQGVGGPSHKARVLAEAMSQVTNSASAAIMMQKGNFGNQRKTVKCCNCGXVGHIARNCRAPRKKGCWKCGKEGHQMKDCNERQANFLGKIWPSHKGRPGNFLQSRPEPTAPPEPTAPPEESFRFGEAAATPSQKQEPIDKDLYPLASLRSLFGNDQLSQ

SEQ ID NO: 658 - protein, 503 aa, Human immunodeficiency virus
  misc_feature (411)..(411): Xaa can be any naturally occurring amino acid
  misc_feature (465)..(465): Xaa can be any naturally occurring amino acid
MGARASVLSGGELDRWEKIRLRPGGKKKYKLKHIVWASRELERFAVNPGLLETSEGCRQILGQLQPSLQTGSEELKSLYNAVAVLYCVHQRIDVKDTKEALEKIEEEQNKSKKKAQQAAADTGTSSSSSQVSQNYPIVQNLQGQMVHQPLSPRTLNAWVKVVEEKAFSPEVIPMFSALSEGATPQDLNTMLNTVGGHQAAMQMLKETINEEAAEWDRLHPVHAGPIAPGQMREPRGSDIAGTTSNLQEQIGWMTHNPPIPVGEIYKRWIILGLNKIVRMYSPTSILDIRQGPKEPFRDYVDRFYKTLRAEQASQEVKNWMTETLLVQNANPDCKTILKALGPGATLEEMMTACQGVGGPSHKARVLAEAMSQATNSANIMMQRGNFGKQRKTVKCFNCGKEGHIAKNCRAXRKRGCWKCGKEGHQMKDCTERQANFLGKIWPSHKGRPGNFLQSRPEPTAPPEEXFRFGEETTTPSQKQETIDKELYPLASLRSLFGNDPSSQ

SEQ ID NO: 659 - protein, 505 aa, Human immunodeficiency virus
  misc_feature (404)..(404): Xaa can be any naturally occurring amino acid
MGARASVLSGGELDKWEKIRLRPGGKKKYKLKHIVWASRELERFAVNPGLLETSEGCRQILGQLQPSLQTGSEELKSLYNTIATLYCVHQKIDVKDTKEALDKIEEEQNKSKKKAQQAAADTRNTADTKSSQVSQNYPIVQNIQGQMVHQAISPRTLNAWVKVVEEKAFSPEVIPMFSALSEGATPQDLNTMLNTVGGHQAAMQMLKETINEEAAEWDRVHPVQAGPVAPGQMREPRGSDIAGTTSTLQEQIGWMTSNPPIPVGEIYKRWIILGLNKIVRMYSPTSILDIRQGPKEPFRDYVDRFYKTLRAEQASQEVKNWMTETLLVQNANPDCKTILKALGPAATLEEMMTACQGVGGPSHKARILAEAMSQVTNSATIMMQRGNFRNQRKSVKCFNCGKRXHIARNCRAPRKKGCWKCGKEGHQMKDCTERQANFLGKIWPSHKGRPGNFLQSRPEPTAPPAECFRFGEETATPPQKQEPIEKELYPLTSLRSLFGNDPSSQ

SEQ ID NO: 660 - protein, 500 aa, Human immunodeficiency virus
MGARASVLSGGKLDRWEKIRLRPGGKKKYKLKHIVWASRELERFAVNPGLLETSEGCRQILRQLQPSLQTGSEELKSLYNTVATLYCVHQGIEVKDTKEALDKIEEEQNKCKKKAQQAAADTGNSSQSSQNYPIVQNLQGQMVHQALSPRTLNAWVKVVEEKAFSPEVIPMFTALSEGATPQDLNTMLNTVGGHQAAMQMLKETINEEAAEWDRVHPVHAGPVAPGQMREPRGSDIAGVTSTLQEQIGWMTSNPPIPVGEIYKKWIIMGLNKIVRMYSPTSILDIKQGPKEPFRDYVDRFYKTLRAEQASQEVKNWMTETLLVQNANPDCKTILKALGPAATLEEMMTACQGVGGPGHKARVLAEAMSQVTNSANVMMQRGNFRDQRKKVKCFNCGKEGHLAKNCRAPRKKGCWKCGKEGHQMKECTERQANFLGKIWPSHKGRPGNFLQSRPEPTAPPEESFRFGEETTTPPQKQEPIDKELYPSASLKSLFGNDPLLQ

SEQ ID NO: 661 - protein, 500 aa, Human immunodeficiency virus
  misc_feature (188)..(188): Xaa can be any naturally occurring amino acid
  misc_feature (201)..(201): Xaa can be any naturally occurring amino acid
  misc_feature (215)..(215): Xaa can be any naturally occurring amino acid
  misc_feature (295)..(295): Xaa can be any naturally occurring amino acid
  misc_feature (498)..(498): Xaa can be any naturally occurring amino acid
MGARASVLSGGELDKWEKIRLRPGGKKKYKLKHIVWASRELERFAVNPGLLETSDGCRQILGQLQPSLQTGSEELKSLFNTVAVLYCVHQRIDVKDTKEALDKVEEEQNKSKKKAQQAAADTGNSSQVSQNYPIVRNIQGQMVHQPISPRTLNAWVKVIEEKAFSPEVIPMFSALSEGATPQDLNTMXNTVGGHQAAMQMXKETINEEAAEWDRXHPAQAGPVAPGQIREPRGSDIAGTTSTLQEQIDWMTHNPPIPVGEIYKRWIILGLNKIVRMYSPTSILDIKQGPKEPFRXYVDRFYKTLRAEQASQEVKNWMTETLLVQNANPDCKTILKALGPAATLEEMMTACQGVGGPGHKARVLAEAMSQMTNATNIMMQGGNFRNQRKFIKCFNCGKEGHLAKNCRAPRKRGCWKCGKEGHQMKDCTERQANFLGKIWPSHKGRPGNFLQNRPEPSAPPEEGCRYGEETTTPSQKQEPIDQEKYPLASLRSLFGSDPXSQ

SEQ ID NO: 662 - protein, 500 aa, Human immunodeficiency virus
MGARASVLSGGELDKWEKIRLRPGGKKKYKLKHLVWASRELERFAVNPGLLETAEGCRQILAQLQPALQTGSEELKSVYNTVATIYCVHQRIEVKDTKEALDKIEEEQNKSKKKTQQAAAGAGNSSQVSQNYPIVQNLQGQMVHQAISPRTLNAWVKVVEEKAFSPEVIPMFSALSEGATPQDLNTMLNTVGGHQAAMQMLKETINEEAAEWDRLHPVHAGPIAPGQMREPRGSDIAGTTSTLQEQIGWMTNNPPIPVGEIYKRWIILGLNKIVRMYSPTSILDIRQGPKEPFRDYVDRFYKTLRAEQASQDVKNWMTETLLVQNANPDCKTILKALGPAATLEEMMTACQGVGGPSHKARILAEAMSQVTSPTTIMMQRGNFKNPRRSVKCFNCGKEGHIAKNCRAPRKKGCWRCGKEGHQMKDCVEGQANFLGKIWPSHKGRPGNFLQSRPEPTAPPEESFRFGEETATPPQKQEPTDRELYPLASLRSLFGNDPSSQ

SEQ ID NO: 663 - protein, 502 aa, Human immunodeficiency virus
  misc_feature (7)..(7): Xaa can be any naturally occurring amino acid
  misc_feature (24)..(24): Xaa can be any naturally occurring amino acid
  misc_feature (34)..(34): Xaa can be any naturally occurring amino acid
  misc_feature (48)..(48): Xaa can be any naturally occurring amino acid
  misc_feature (51)..(51): Xaa can be any naturally occurring amino acid
  misc_feature (54)..(54): Xaa can be any naturally occurring amino acid
  misc_feature (75)..(75): Xaa can be any naturally occurring amino acid
  misc_feature (81)..(81): Xaa can be any naturally occurring amino acid
  misc_feature (91)..(91): Xaa can be any naturally occurring amino acid
  misc_feature (98)..(98): Xaa can be any naturally occurring amino acid
  misc_feature (100)..(100): Xaa can be any naturally occurring amino acid
  misc_feature (103)..(103): Xaa can be any naturally occurring amino acid
  misc_feature (123)..(123): Xaa can be any naturally occurring amino acid
  misc_feature (129)..(129): Xaa can be any naturally occurring amino acid
  misc_feature (150)..(150): Xaa can be any naturally occurring amino acid
  misc_feature (167)..(167): Xaa can be any naturally occurring amino acid
  misc_feature (169)..(169): Xaa can be any naturally occurring amino acid
  misc_feature (357)..(357): Xaa can be any naturally occurring amino acid
  misc_feature (367)..(367): Xaa can be any naturally occurring amino acid
  misc_feature (473)..(473): Xaa can be any naturally occurring amino acid
  misc_feature (497)..(497): Xaa can be any naturally occurring amino acid
  misc_feature (500)..(500): Xaa can be any naturally occurring amino acid
MGARASXLSGGELDRWEKIRLRPXGKKKYRLKHXVWASRELERFAVNXGLXETXEGCRQILGQLQPSLQTGSEEXKSLYNXIAVLYCVHQXIDVKDTXEXLDXIEEEQNKSKKKAQQAAAVHXDTGNSXQVSQNYPIVQNLQGQMVHQPXSPRTLNAWVKVVEEKAXSXEVIPMFSALSEGATPQDLNTMLNTVGGHQAAMQMLKETINEEAAEWDRLHPVHAGPIAPGQMREPRGSDIAGTTSTLQEQIGWMTNNPPIPVGEIYKRWIILGLNKIVRMYSPTSILDIKQGPKEPFRDYVDRFYKVLRAEQASQDVKNWMTETLLVQNANPDCKTILKALGPAATLEEMMTACQGVXGPGHKARVLXEAMSQVTNSATIMMQRGNFRGPRKNVKCFNCGREGHIAKNCRAPRKKGCWKCGKEGHQMKDCTERQANFLGKIWPSHKGRPGNFLQSRPEPTAPPEESFRFGEETXPSQKPEPIDKDLYPLASLKSLFGXDPXSQ

SEQ ID NO: 664 - protein, 504 aa, Human immunodeficiency virus
  misc_feature (92)..(92): Xaa can be any naturally occurring amino acid
  misc_feature (314)..(314): Xaa can be any naturally occurring amino acid
  misc_feature (410)..(410): Xaa can be any naturally occurring amino acid
  misc_feature (436)..(436): Xaa can be any naturally occurring amino acid
  misc_feature (453)..(453): Xaa can be any naturally occurring amino acid
  misc_feature (467)..(467): Xaa can be any naturally occurring amino acid
  misc_feature (469)..(469): Xaa can be any naturally occurring amino acid
  misc_feature (471)..(471): Xaa can be any naturally occurring amino acid
  misc_feature (478)..(478): Xaa can be any naturally occurring amino acid
  misc_feature (481)..(481): Xaa can be any naturally occurring amino acid
  misc_feature (485)..(485): Xaa can be any naturally occurring amino acid
MGARASVLSGGELDRWEKIRLRPGGKKKYKLKHVVWASRELERFAVNPGLLETSEGCRKILGQLQPSLQTGSEELKSLYNTVATLYCVHQKXDVRDTKEALEKIEEEQNKCKKKAQQAAADTGNNTGNSSQVSQNYPIVQNLQGQMVHQAISPRTLNAWVKVVEEKAFSPEVIPMFTALSEGATPQDLNTMLNTVGGHQAAMQMLKETINEEAAEWDRMHPVHAGPIAPGQMREPRGSDIAGTTSTLQEQIGWMTSNPAIPVGEIYKRWIILGLNKIVRMYSPTSILDIKQGPKEPFRDYVDRFYKTLRAEQAXQDVKNWMTETLLVQNANPDCKTILKALGPAATLEEMMTACQGVGGPGHKARVLAEAMSQVTNSASIMMQRGNFRNQRKTVKCFNCGKEGHIARNCXAPRKKGCWKCGREGHQMKDCTERQAXFLGKIWPSHKGRPGNFXQSRPEPTAPPAPPXEXFXFGEETTXPSXKQEXIDKELYPLASLKSLFGNDH

SEQ ID NO: 665 - protein, 500 aa, Human immunodeficiency virus
MGARASVLSGGELDRWEKIRLRPGGKKKYRLKHIVWASRELERFAVNPGLLETSVGCKQILEQLQPSLQTGSEELKSLFNTIATLYCVHLRIDVKDTKEALDKIEEEQNKSKKKAQQAAAGTGNNSQVSQNYPIVQNLQGQMVHQPLSPRTLNAWVKVVEEKAFSPEVIPMFSALSEGATPQDLNTMLNTVGGHQAAMQMLKETINEEAADWDRLHPVHAGPVAPGQMREPRGSDIAGTTSTLQEQIGWMTNNPPIPVGEIYKRWIIMGLNKIVRMYSPTSILDIRQGPKEPFRDYVDRFYKTLRAEQASQEVKNWMTETLLVQNANPDCKTILKALGPAATLEEMMTACQGVGGPGHKARVLAEAMSQVTTPPVIMMQKDNFRNQKRTVKCFNCGRDGHIAKNCRAPRKRGCWKCGKEGHQMKDCTERQANFLGKIWPSYKGRPGNFLQSRPEPTAPPEESFRFGEETTTPSQKQEPIDKEMYPLTSLKSLFGNDPSSQ

SEQ ID NO: 666 - protein, 502 aa, Human immunodeficiency virus
  misc_feature (467)..(467): Xaa can be any naturally occurring amino acid
MGARASVLSGGKLDRWEKIRLRPGGKKKYKLKHLVWASRELERFAVNPSLLETPEGCRQILGQLHPSLQTGSEELKSLYNTVATLYCVHQNIDVKDTKEALEKVEEEQNKSKKKAQQAAADTGSSSQVSQNYPIVQNLQGQMVHQALSPRTLNAWVKVVEEKAFSPEVIPMFTALSEGATPQDLNTMLNTVGGHQAAMQMLKETINEEAAEWDRLHPVHAGPIAPGQMREPRGSDIAGTTSNLQEQIGWMTNNPPIPVGEIYKRWIILGLNKIVRMYSPTSILDIKQGPKEPFRDYVDRFYKTLRAEQASQEVKNWMTETLLVQNSNPDCKTILKALGPAATLEEMMTACQGVGGPGHKARVLAEAMSQVTNSTAVMMQKGTFRNQRKPVKCFNCGKEGHIARNCRAPRKRGCWKCGKEGHQMKDCTERQANFLGRIWPSHKGRPGNFLQSRPEPTAPPEESFRFGXETTTPSQKQELIDLDKELYPLASLKSLFGNDPSSK

SEQ ID NO: 667 - protein, 505 aa, Human immunodeficiency virus
  misc_feature (5)..(5): Xaa can be any naturally occurring amino acid
  misc_feature (16)..(16): Xaa can be any naturally occurring amino acid
  misc_feature (73)..(73): Xaa can be any naturally occurring amino acid
  misc_feature (78)..(78): Xaa can be any naturally occurring amino acid
  misc_feature (120)..(120): Xaa can be any naturally occurring amino acid
  misc_feature (220)..(220): Xaa can be any naturally occurring amino acid
  misc_feature (478)..(478): Xaa can be any naturally occurring amino acid
MGARXSVLSGGELDRXKKIRLRPGGKKKYKLKHIVWASRELERFAVNPGLLETSGGCKQILQQLQPSLQTGSXELKSXYNTVATLYCVHNKIEVRDTKEALEKIEEEQNKSKKRAQQAAXDTGNNSQVSQNYPIVQNMQGQMVHQALSPRTLNAWVKVVEEKAFSPEVIPMFAALSEGATPQDLNTMLNTVGGHQAAMQMLKETINEEAAEWDRLHPVHXGPIAPGQMREPRGSDIAGTTSTLQEQIGWMTHNPPIPVGEIYKKWIIMGLNKIVRMYSPTSILDIKQGPKEPFRDYVDRFYKTLRAEQATQEVKNWMTETLLVQNANPDCKTILKALGPAATLEEMMTACQGVGGPGHKARVLAEAMSQVTGSATIMMQGGNYKNQRKTVKCFNCGKEGHIAKNCRAPRKRGCWKCGKEGHQMKECTERQANFLGKIWPSHKGRPGNFLQSKSETTRIEPTAPPAESFRFGEETTTPXQKPELIDKEMYPLASLRSLFGNDPSSQ

SEQ ID NO: 668 - protein, 502 aa, Human immunodeficiency virus
  misc_feature (297)..(297): Xaa can be any naturally occurring amino acid
  misc_feature (442)..(442): Xaa can be any naturally occurring amino acid
  misc_feature (446)..(446): Xaa can be any naturally occurring amino acid
  misc_feature (448)..(448): Xaa can be any naturally occurring amino acid
  misc_feature (451)..(451): Xaa can be any naturally occurring amino acid
  misc_feature (482)..(482): Xaa can be any naturally occurring amino acid
  misc_feature (488)..(488): Xaa can be any naturally occurring amino acid
MGARASVLSGGKLDRWERIRLRPGGKKKYKLKHLVWASRELERFAVNPGLLETAEGCRQILGQLQPSLQTGSEELKSLFNTVATLYCVHQGIDVKDTKEALDKIEEEQNKSKKKAQQAAAQTAAADTGSNNQVSHNYPIVQNIQGQMVHQAISPRTLNAWVKVIEEKAFSPEVIPMFTALSEGATPQDLNTMLNTVGGHQAAMQMLKETINEEAAEWDRLHPVHAGPVAPGQMREPRGSDIAGTTSTLQEQIAWMTNNPPVPVGEIYKRWIILGLNKIVRMYSPVSILDIKQGPKEXFRDYVDRFYKTLRAEQASQDVKNWMTETLLVQNANPDCKTILKALGPGATLEDMMTACQGVGGPGHKARVLAEAMSQMNSTTVMMQRGNFRNQRKIVKCFNCGKEGHIAKNCRAPRKKGCWKCGQEGHQMKDCTERQANFLGKIXPSHXGXPGXFLQSRPEPTAPPEESFRFGEETTTPPQKQEXKELYPXTSLRSLFGNDPLSQ

SEQ ID NO: 669 - protein, 502 aa, Human immunodeficiency virus
MGARASVLSGGELDRWEKIRLRPGGKKKYRLKHIIWASRELERFSVNPGLLETSEGCRQILGQFQPSLQTGSEELKSLYNTVATLYCVHQRIDVKDTKEALEKVEEEQNKSKKKAQQAAADTGNSNKVSQNYPIVQNMQGQMVHQPISPRTLNAWVKVIEEKAFSPEVIPMFSALSEGATPQDLNTMLNTVGGHQAAMQMLKEAINEEAAEWDRLHPVAAGPVAPGQMREPRGSDIAGTTSTLQEQIGWMTSNPPIPVGEIYKRWIIMGLNKIVRMYSPVSILDIRQGPKEPFRDYVDRFYKTLRAEQATQEVKNWMTETLLVQNANPDCKTILKALGPAASLEEMMTACQGVGGPGHKARVLAEAMSQVTNSSAIMMQRGNFRDQRKIVKCFNCGKDGHIAKNCRAPRKRGCWKCGKEGHQMKDCTERERQANFLGKIWPSHKGRPGNFHQSRLEPTAPPEESFRFGEETTTPSQRQEPKDKELYPLASLKSLFGNDPSSQ

SEQ ID NO: 670 - protein, 498 aa, Human immunodeficiency virus
  misc_feature (497)..(497): Xaa can be any naturally occurring amino acid
MGARASVLSGGELDRWERIRLRPGGSKKYKLKHIVWASRELERFAVNPSLLETSEGCKQILGQLQPSLQTGSEELKSLFNTVATLYCVHQRIEIKDTQEALEKIKEEQDKSKKRAQQAEAGTGNSSQASQNYPIVQNLQGQMVHQPLTPRTLNAWVKVIEEKAFSPEVIPMFSALSEGATPQDLNTMLNTVGGHQAAMQMLKETINEEAAEWDRMHPVHAGPIAPGQMREPRGSDIAGTTSTLQEQIGWMTSNPPIPVGEIYKRWIILGLNKIVRMYSPVSILDIRQGPKEPFRDYVDRFYKTLRAEQATQEVKNWMTETLLVQNANPDCKTILKALGPAATLEEMMTACQGVGGPGHKARVLAEAMSQVNSTNIMMQKGNVRNQRKTVKCFNCGKEGHIARNCRAPRKKGCWKCGREGHQMKDCTERQANFLGKIWPSSKGRPGNFPQSRTEPTAPPEESFRFGEQTTPHQKQEPIDQERSPLTSLRSLFGNDPLXQ

SEQ ID NO: 671 - protein, 503 aa, Human immunodeficiency virus
  misc_feature (128)..(128): Xaa can be any naturally occurring amino acid
  misc_feature (159)..(159): Xaa can be any naturally occurring amino acid
  misc_feature (219)..(219): Xaa can be any naturally occurring amino acid
  misc_feature (372)..(372): Xaa can be any naturally occurring amino acid
  misc_feature (400)..(400): Xaa can be any naturally occurring amino acid
  misc_feature (481)..(481): Xaa can be any naturally occurring amino acid
  misc_feature (502)..(502): Xaa can be any naturally occurring amino acid
MGARASILSGGELDRWEKIRLRPGGKKQYRLKHLVWASRELERFAVNPGLLETSDGCRRILKQLQPSLQTGSEELKSLYNTVATLYCVHQRIGVRDTKEALDKVEEEQNESKKKTQQAAAGTGNNSQXSQNYPIVQNLQGQMVHQALSPRTLNAWVKVXEEKAFSPEVIPMFSALSEGATPQDLNTMLNTVGGHQAAMQMLKETINEEAAEWDRLHPVXAGPVAPGQMREPRGSDIAGTTSTLQEQIGWMTNNPPIPVGEIYKRWIIMGLNKIVRMYSPTSILDIRQGPKEPFRDYVDRFYKTLRAEQASQEVKNWMTETLLVQNANPDCKTILKALGPGATLEEMMTACQGVGGPGHKARVLAEAMSQVTXSATIMMQRGNFKNQRKTVKCFNCGKEGXIARNCRAPRKKGCWKCGQEGHQMKDCTERQANFLGKIWPSHKGRPGNFLQSRPEPTAPPAPPEESFRFGEKTTTPPQKQEXLDKELYPVTSLRSLFGNDPSXQ

SEQ ID NO: 672 - protein, 500 aa, Human immunodeficiency virus
MGARASVLSGGKLDNWEKIRLRPGGKKKYRLKHIVWASRELERFAVNPGLIETAEGCKQILGQLQPSLQTGSEELKSLFNTIAVLYCVHKRIEVRDTKEALDKIEEEQNNSKKKAQQAEADTGNSKQVSQNYPIVQNLQGQMVHQAISPRTLNAWVKVVEEKAFSPEVIPMFSALSEGATPQDLNTMLNTVGGHQAAMQMLKETINEEAAEWDRLHPAQAGPIAPGQMREPRGSDIAGTTSTLQEQIGWMTSNPPVPVGEIYKRWIIMGLNKIVRMYSPTSILDIKQGPKEPFRDYVDRFYKTLRAEQASQEVKHWMTETLLVQNANPDCKTILKALGPGATLEEMMSACQGVGGPGHKARVLAEAMSQVTNSAAIMMQKGNFRSQRKPIKCFNCGKEGHTARNCRAPRKKGCWKCGKEGHQMKECTERQANFLGKIWPSHKGRPGNFLQSRPEPTAPPEESFRFGEETTAPAQKQEPIVKEMYPLTSLRSLFGNDPSSQ

SEQ ID NO: 673 - protein, 507 aa, Human immunodeficiency virus
  misc_feature (82)..(82): Xaa can be any naturally occurring amino acid
  misc_feature (360)..(360): Xaa can be any naturally occurring amino acid
  misc_feature (380)..(380): Xaa can be any naturally occurring amino acid
  misc_feature (397)..(397): Xaa can be any naturally occurring amino acid
  misc_feature (399)..(399): Xaa can be any naturally occurring amino acid
MGARASVLSGGELDKWEKIRLRPGGKKKYKLKHIVWASRELERFAVNPGLLETSGGCRQILEQLQPSLQTGSEELRSLYNTXATLYCVHQKIEIKDTKEALEKIEEEQNKSKKKTQQAAAAAAAAAADTGNRGQVSQNYPIVQNLQGQMVHQPISPRTLNAWVKVIEEKAFSPEVIPMFTALSEGATPQDLNTMLNTVGGHQAAMQMLKETINEEAAEWDRLHPVHAGPIAPGQMREPRGSDIAGTTSTLQEQIGWMTNNPAIPVGEIYKRWIILGLNKIVRMYSPTSILDIKQGPKEPFRDYVDRFYKTLRAEQASQEVKNWMTETLLVQNSNPDCKTILKALGPAATLEEMMTACQGXGGPSHKARVLAEAMSQATNXATVMMQRGNFRNQRKTXKXFNCGKEGHIAKNCRAPRKRGCWKCGKEGHQMKDCTERQANFLGKIWPSHKGRPGNFLQSRPEPSAPPEESFRFGEEATAPPQKQEPTDKDLYPLASLRSLFGNDPSSQ

SEQ ID NO: 674 - protein, 499 aa, Human immunodeficiency virus
  misc_feature (84)..(84): Xaa can be any naturally occurring amino acid
  misc_feature (86)..(86): Xaa can be any naturally occurring amino acid
  misc_feature (181)..(181): Xaa can be any naturally occurring amino acid
  misc_feature (208)..(208): Xaa can be any naturally occurring amino acid
  misc_feature (226)..(226): Xaa can be any naturally occurring amino acid
  misc_feature (253)..(253): Xaa can be any naturally occurring amino acid
  misc_feature (389)..(389): Xaa can be any naturally occurring amino acid
  misc_feature (447)..(447): Xaa can be any naturally occurring amino acid
MGARASILSGGELDRWEKIRLRPGGKKQYKLKHLVWASRELERFAVNPGLLETADGCKKILGQLHPSLQTGSEELKSLYNTVAXLXCVHQRIEVKDTKEALDKIEEEQNKCQKKAQQTAAGTGSGSQVSQNYPIVQNLQGQMVHQALSPRTLNAWVKVIEEKAFSPEVIPMFSALSEGATXQDLNTMLNTVGGHQAAMQMLKETINEXAAEWDRLHPVHAGPVAPXQMRDPRGSDIAGTTSTLQEQIAWMTGXPAIPVGEIYKRWIILGLNKIVRMYSPVSILDIKQGPKEPFRDYVDRFYKTLRAEQATQEVKNWMTETLLVQNANPDCKTILKALGPGATLEEMMTACQGVGGPGHKARVLAEAMSQMNSANVMMQQGNFKGQRRIXKCFNCGKEGHIAKNCRAPRKKGCWKCGKEGHQMKDCTNGRQANFLGKVWPSSKGRPGXFPQSRIEPSAPPEESLRFGEEMTPPQKQGQTDKELYPLTSLRSLFGSDPSSQ

SEQ ID NO: 675 - protein, 500 aa, Human immunodeficiency virus
  misc_feature (34)..(34): Xaa can be any naturally occurring amino acid
  misc_feature (40)..(40): Xaa can be any naturally occurring amino acid
  misc_feature (66)..(66): Xaa can be any naturally occurring amino acid
  misc_feature (93)..(93): Xaa can be any naturally occurring amino acid
  misc_feature (122)..(122): Xaa can be any naturally occurring amino acid
  misc_feature (139)..(139): Xaa can be any naturally occurring amino acid
  misc_feature (269)..(269): Xaa can be any naturally occurring amino acid
  misc_feature (304)..(304): Xaa can be any naturally occurring amino acid
  misc_feature (341)..(341): Xaa can be any naturally occurring amino acid
  misc_feature (465)..(465): Xaa can be any naturally occurring amino acid
  misc_feature (471)..(471): Xaa can be any naturally occurring amino acid
MGARASVLSGGELDRWEKIRLRPGGKKKYKLKHXVWASRXLERFAVNPGLLETSEGCRQILGQLQXALQTGSEELKSLYNTVATLYCVHQRIXVKDTKEALEKIEEEQNKSKKKAQQAAADXGNSSQVSQNYPIVQNMXGQMVHQAISPRTLNAWVKVIEEKAFSPEVIPMFSALSEGATPQDLNTMLNTVGGHQAAMQMLKETINEEAAEWDRLHPVHAGPIAPGQMREPRGSDIAGTTSTLQEQIGWMTNNPPIPVGEIYKRWIILXLNKIVRMYSPVSILDIRQGPKEPFRDYVDRFYKTXRAEQATQEVKNWMTETLLVQNANPDCKTILKALGPAXTLEEMMTACQGVGGPGHKARVLAEAMSQVTSSATVMMQKGNFRNQRKPVKCFNCGKDGHIARNCRAPRKRGCWKCGKEGHQMKDCTERQANFLGKIWPSSKGRPGNFLQNRPEPTAPPEESFRXGEETTXPSQKQETIDKDLYPLTSLKSLFGNDPSST

SEQ ID NO: 676 - protein, 503 aa, Human immunodeficiency virus
  misc_feature (2)..(2): Xaa can be any naturally occurring amino acid
  misc_feature (413)..(413): Xaa can be any naturally occurring amino acid
  misc_feature (415)..(415): Xaa can be any naturally occurring amino acid
  misc_feature (464)..(464): Xaa can be any naturally occurring amino acid
  misc_feature (477)..(477): Xaa can be any naturally occurring amino acid
  misc_feature (479)..(479): Xaa can be any naturally occurring amino acid
  misc_feature (483)..(483): Xaa can be any naturally occurring amino acid
MXARASVLSGGKLDAWERIRLRPGGKKKYKLKHIVWASRELERFAVNPGLLETADGCRQILMQLQPSLQTGSEELKSLYNTVVTLYCVHQRIEVRDTKEALDKVEEEQNKSKKKAQQAAAATGESSRENSQVSHNYPIVQNLQGQMVHQALSPRTLNAWVKVVEEKAFSPEVIPMFTALSEGATPQDLNTMLNTVGGHQAAMQILKETINEEAADWDRVHPVHAGPIAPGQMREPRGSDIAGTTSTLQEQIGWMTSNPPIPVGEIYKRWIILGLNKIVRMYSPTSILDIKQGPKEPFRDYVDRFYKTLRAEQASQDVKNWMTETLLVQNANPDCKTILKALGPAATLEEMMTACQGVGGPSHKARVLAEAMSQVTNSATVMMQKGNFRNQKKIVKCFNCGKVGHIARNCRAPXKXGCWKCGKEGHQMKDCNEGQANFLGKIWPSHKGRPGNFPQSRLEPTAPPXESFRFGEETTPPXKXEPTXKELYPLASLRSLFGNDPSSQ

SEQ ID NO: 677 - protein, 501 aa, Human immunodeficiency virus
  misc_feature (101)..(101): Xaa can be any naturally occurring amino acid
  misc_feature (210)..(210): Xaa can be any naturally occurring amino acid
  misc_feature (222)..(222): Xaa can be any naturally occurring amino acid
  misc_feature (243)..(243): Xaa can be any naturally occurring amino acid
  misc_feature (269)..(269): Xaa can be any naturally occurring amino acid
  misc_feature (304)..(304): Xaa can be any naturally occurring amino acid
  misc_feature (323)..(323): Xaa can be any naturally occurring amino acid
  misc_feature (338)..(338): Xaa can be any naturally occurring amino acid
  misc_feature (429)..(429): Xaa can be any naturally occurring amino acid
  misc_feature (442)..(442): Xaa can be any naturally occurring amino acid
  misc_feature (484)..(484): Xaa can be any naturally occurring amino acid
MGARASVLSGGKLDKWEKIRLRPGGKKKYKLKHIIWASRELERFAVNPGLLETAEGCKRILIQLHPSLQTGSEELKSLYNTVATLYCVHQQIEIKDTKEAXDKIEEEQNKSKKKQEQQAAADTGNSSQVSHNYPIVQNLQGQMVHQALSPRTLNAWVKVVEEKAFSPEVIPMFSALSEGATPQDLNTMLNTVGGHQAAMQMLKETINEEXAEWDRLHPVHAXPIAPGQMREPRGSDIAGTTSXLQEQIAWMTNNPPIPVGEIYKRWIIXGLNKIVRMYSPTSILDIRQGPKEPFRDYVDRFYKXLRAEQASQEVKNWMTETLXVQNANPDCKTILKAXGPGATLEEMMTACQGVGGPSHKARVLAEAMSQVTSSATVMMQRGNGRNQRKTVKCFNCGREGHIAKNCRAPRKKGCWKCGKEGHQMKDCTXRQANFLGKIWPSXKGRPGNFLQSRPEPSAPPEESFRFGEETTTPAQKQEPIDKEXYPLTSLRSLFGNDPSSQ

SEQ ID NO: 678 - protein, 504 aa, Human immunodeficiency virus
  misc_feature (4)..(4): Xaa can be any naturally occurring amino acid
MGAXASVLSGGELDKWEKIRLRPGGKKKYQLKHIVWASRELERFALNPGLLETSGGCRQILGQLQPSLQTGSEELRSLYNTVAVLYCVHQKIEIKDTKEALDKIEEEQNKSKKKAQQAAADTGNSSSQVSQNYPIVQNIQGQMVHQPLSPRTLNAWVKVIEEKNFSPEVIPMFSALAEGATPQDLNTMLNTVGGHQAAMQMLKETINEEAAEWDRLHPVQAGPVAPGQLREPRGSDIAGTTSTLQEQIAWMTHNPPIPVGEIYKRWIILGLNKIVRMYSPVSILDIRQGPKEPFRDYVDRFYKTLRAEQASQDVKNWMTETLLVQNANPDCKTILKALGPAATLEEMMTACQGVGGPSHKARVLAEAMSQVTNPATVMVQKGNFRNQRKIVKCFNCGKEGHIARNCRAPRKKGCWKCGQEGHQMKDCSERQANFLGKIWPSHKGRPGNFLQSRPEPSAPPEESFRFGEGTTTHPQKQEKQEPIDKELYPLASLRSLFGNDPSSQ

SEQ ID NO: 679 - protein, 500 aa, Human immunodeficiency virus
  misc_feature (119)..(119): Xaa can be any naturally occurring amino acid
  misc_feature (138)..(138): Xaa can be any naturally occurring amino acid
  misc_feature (354)..(354): Xaa can be any naturally occurring amino acid
  misc_feature (486)..(486): Xaa can be any naturally occurring amino acid
MGARASVLSGGDLDRWEKIRLRPGGKKQYKLKHIVWASRELERFAVNPGLLETAGGCKQILEQLQPALRTGSEELTSLYNTVAVLFCVHQKIEVKDTKEALEKIEEEQNKSKKKAQQAXADAGNKSQVSQNYPIVQNXQGQMVHQPIAPRTLNAWVKVVEEKAFSPEVIPMFSALSEGATPQDLNTMLNTVGGHQAAMQMLKETINEEAAEWDRLHPVQAGPIAPGQIREPRGSDIAGTTSTLQEQIAWMTHNPPIPVGDIYKRWIILGLNKIVRMYSPTSILDIRQGPKEPFRDYVDRFYKTLRAEQASQDVKNWMTETLLVQNANPDCKTILKALGPAATLEEMMTACQGVXGPGHKARVLAEAMSQVTNPATVMMQRGNFRNQRKIVKCFNCGKEGHIARNCRAPRKKGCWKCGKEGHQMKECTERQANFLGKIWPSHKGRPGNFLQSRPEPTAPPEESFRFGEEITTPSQKQEPIDKEQYPXTSLRSLFGNDPSSQ

SEQ ID NO: 680 - protein, 500 aa, Human immunodeficiency virus
  misc_feature (93)..(93): Xaa can be any naturally occurring amino acid
  misc_feature (188)..(188): Xaa can be any naturally occurring amino acid
  misc_feature (286)..(286): Xaa can be any naturally occurring amino acid
  misc_feature (310)..(310): Xaa can be any naturally occurring amino acid
  misc_feature (334)..(334): Xaa can be any naturally occurring amino acid
  misc_feature (359)..(359): Xaa can be any naturally occurring amino acid
  misc_feature (406)..(406): Xaa can be any naturally occurring amino acid
  misc_feature (442)..(442): Xaa can be any naturally occurring amino acid
  misc_feature (444)..(444): Xaa can be any naturally occurring amino acid
  misc_feature (460)..(460): Xaa can be any naturally occurring amino acid
  misc_feature (471)..(471): Xaa can be any naturally occurring amino acid
MGARASVLSGGDLDRWEKIRLRPGGKKKYRLKHLVWASRELERFAVNPGLLETSEGCRQILGQLQPSLQTGSEELRSLYNTVATLYCVHQKIXVKDTKEALDKIEEEQNKSKKKAQQAAADTGNSNQVSRNYPIVQNMQGQNVHQALSPRTLNAWVKVIEEKAFSPEVIPMFTALSEGATPQDLNTMXNTVGGHQAAMQILKETINEEAAEWDRLHPVHAGPIAPGQMREPRGSDIAGTTSTLQEQIGWMTNNPPIPVGEIYKRWIVMGLNKIVRMYSPTSILDIXQGPKEPFRDYVDRFYKTLRAEQAXQEVKNWMTETLLVQNANPDCKHIXKALGPAATLEEMMTACQGVGGPAHXARVLAEAMSQVTNSATIMMQRGNLRNQRKIVKCFNCGKEGHIARNCXAPRKRGCWKCGKEGHQMKECTERQANFLGKIWPSPXGXPGNFLQSRPEPTAPPXESFRFGEEPTXPPQELGQKDKELYPLASLRSLFGNDPSSQ

SEQ ID NO: 681 - protein, 505 aa, Human immunodeficiency virus
  misc_feature (62)..(62): Xaa can be any naturally occurring amino acid
  misc_feature (82)..(82): Xaa can be any naturally occurring amino acid
  misc_feature (125)..(125): Xaa can be any naturally occurring amino acid
  misc_feature (138)..(138): Xaa can be any naturally occurring amino acid
MGARASVLSAGELDRWEKIRLRPGGKKKYRLKHIVWASRELERFAVNPGLLETAEGCRQILXQLQPSLQTGSEELKSLFNTXATLYCVHQKIEIRDTKEALDKIEEEQNKSKKQAQQAAAGTGNXSQASQNYPIVQNXQGQMVHQPISPRTLNAWVKVVEEKAFSPEVIPMFSALAEGATPQDLNTMLNTVGGHQAAMQMLKETINEEAAEWDRVHPVHAGPVAPGQMREPRGSDIAGTTSTLQEQIGWMTNNPPIPVGEIYKRWIILGLNKIVRMYSPTSILDIKQGPKEPFRDYVDRFYKTLRAEQASQEVKNWMTETLLVQNSNPDCKTILKALGPAATLEEMMTACQGVGGPGHKARVLAEAMSQVTNSATIMMQKGNFRNQRKAIKCFNCGKEGHVARNCRAPRKKGCWKCGREGHQMKDCTERQANFLGKIWPSHKGRPGNFLQSRPTAPPVEPTAPPEESFRFGEETTTPPQKQELTDKELYPLASLKSLFGNDPLSQ

SEQ ID NO: 682 - protein, 500 aa, Human immunodeficiency virus
  misc_feature (56)..(56): Xaa can be any naturally occurring amino acid
  misc_feature (146)..(146): Xaa can be any naturally occurring amino acid
  misc_feature (166)..(166): Xaa can be any naturally occurring amino acid
  misc_feature (168)..(168): Xaa can be any naturally occurring amino acid
  misc_feature (260)..(260): Xaa can be any naturally occurring amino acid
  misc_feature (283)..(283): Xaa can be any naturally occurring amino acid
  misc_feature (327)..(327): Xaa can be any naturally occurring amino acid
  misc_feature (353)..(353): Xaa can be any naturally occurring amino acid
  misc_feature (390)..(390): Xaa can be any naturally occurring amino acid
  misc_feature (428)..(428): Xaa can be any naturally occurring amino acid
MGARASILSGGELDRWEKIRLRPGGKKQYKLKHIVWASRELERFALNPGLLETTEXCRQILGQLQPSLQTGSEELKSLYNTVATLYCVHKKIDVRDTKEALDKIEEEQNKCKAKAQQAAAGTGNSSQVSQNYPIVQNLQGQMVHQXISPRTLNAWVKVVEEKAFSXEXIPMFSALSEGATPQDLNTMLNTVGGHQAAMQMLKETINEEAAEWDRLHPVHAGPIAPGQMREPRGSDIAGTTSTLQEQIGWMTNNPPIPVGXIYKRWIILGLNKIVRMYSPTSIXDIKQGPKEPFRDYVDRFYKTLRAEQATQEVKNWMTETLLVQNAXPDCKTILKALGPAATLEEMMTACQGXGGPGHKARVLAEAMSQVTNTSNAIMMQRGNFRNTKKXVKCFNCGKEGHIARNCRAPRKKGCWKCGKEGHQMKDCXRQANFLGKIWPSHKGRPGNFLQNRPEPTAPPEESFRFREETTTPSQKQEQIDKELYPLASLKSLFGNDPSSQ

SEQ ID NO: 683 - protein, 504 aa, Human immunodeficiency virus
  misc_feature (9)..(9): Xaa can be any naturally occurring amino acid
  misc_feature (26)..(26): Xaa can be any naturally occurring amino acid
  misc_feature (29)..(29): Xaa can be any naturally occurring amino acid
  misc_feature (73)..(73): Xaa can be any naturally occurring amino acid
  misc_feature (91)..(91): Xaa can be any naturally occurring amino acid
  misc_feature (185)..(185): Xaa can be any naturally occurring amino acid
  misc_feature (215)..(215): Xaa can be any naturally occurring amino acid
  misc_feature (217)..(217): Xaa can be any naturally occurring amino acid
  misc_feature (219)..(219): Xaa can be any naturally occurring amino acid
  misc_feature (223)..(223): Xaa can be any naturally occurring amino acid
  misc_feature (230)..(230): Xaa can be any naturally occurring amino acid
  misc_feature (389)..(389): Xaa can be any naturally occurring amino acid
  misc_feature (407)..(407): Xaa can be any naturally occurring amino acid
  misc_feature (413)..(413): Xaa can be any naturally occurring amino acid
  misc_feature (435)..(435): Xaa can be any naturally occurring amino acid
  misc_feature (451)..(451): Xaa can be any naturally occurring amino acid
  misc_feature (453)..(453): Xaa can be any naturally occurring amino acid
  misc_feature (477)..(477): Xaa can be any naturally occurring amino acid
  misc_feature (489)..(489): Xaa can be any naturally occurring amino acid
MGARASVLXGGKLDRWERIRLRPGGXKKXKLKHLVWASRELERFAVNPGLLETSEGCRQILGQLQPALQTGSXELKSLYNTVATLYCVHQXIEVRDTKEALDKVEEEQNKSKKKAQQAAADTGNSNQVSQNYPIVQNLQGQMVHQAISPRTLNAWVKVVEEKAFSPEVIPMFSALSEGATPGDLXTMLNSVGGHQAAMQMLKETINEEAAEWDRXHXVXAGPXAPGQMRXPRGSDIAGTTSTLQEQIGWMTSNPPIPVGEIYKRWIILGLNKIVRMYSPTSILDIRQGPKEPFRDYVDRFYKTLRAEQASQEVKNWMTETLLVQNANPDCKTILKALGPGATLEEMMTACQGVGGPSHKARVLAEAMSQVTTSNAIMMQRGNFRNQGKXIKCFNCGKEGHLARNCKXPRKKGXWKCGREGHQMKDCTERQANFLXKIWPSHKGRPGNFLQXRXEPTAPPAEPTAPPAESFRFGEETXTPPQKQESMDKXMYPLASLRSLFGNDP

SEQ ID NO: 684 - protein, 500 aa, Human immunodeficiency virus
  misc_feature (278)..(278): Xaa can be any naturally occurring amino acid
  misc_feature (446)..(446): Xaa can be any naturally occurring amino acid
  misc_feature (471)..(471): Xaa can be any naturally occurring amino acid
MGARASVLSGGELDRWEKIRLRPGGKKKYRLKHVVWASRELERFAVNPGLLETSEGCRQILGQLQPALQTGSEELRSLYNTVATLYCVHKKIDVKDTKEALDKIEEEQNKSKRKTQQAAADTGNSSQVSQNYPIVQNLQGQMVHQALSPRTLNAWVKVVEEKAFSPEVIPMFSALSEGATPQDLNTMLNTVGGHQAAMQMLKETINEEAAEWDRLHPVQAGPVAPGQIREPRGSDIAGTTSTLQEQIAWMTHNPPIPVGEIYKRWIILGLNKIVRMYXPTSILDIKQGPKEPFRDYVDRFYRTLRAEQASQEVKNWMTETLLVQNANPDCKTILKALGPAATLEEMMTACQGVGGPGHKARVLAEAMSQVTNSATIMMQKGNYRNQRKIVKCFNCGKEGHIAKNCKAPRKKGCWKCGKEGHQMKDCLERQANFLGKIWPSQKGRPXNFPQGRLEPTAPPEESFRSGEETTXPDQKQERTDKEMYPVTSLRSLFGNDPLSQ

SEQ ID NO: 685 - protein, 507 aa, Human immunodeficiency virus
  misc_feature (431)..(431): Xaa can be any naturally occurring amino acid
MGARASVLSGGKLDKWEKIRLRPGGKKKYQLKHIVWASRELERFAVNPGLLETSDGCRQILGQFQPSLQTGSEELKSLYNTVATLYCVHQNIEVLDTKEALEKVEEEQNKSKKKAQQAAADTGNSKQVSQNYPIVQNLQGQMVHQAISPRTLNAWVKVIEEKAFSPEVIPMFSALSEGATPQDLNTMLNTVGGHQAAMQMLKETINEEAAEWDRLHPVPAGPVAPGQMRDPRGSDIAGTTSTLQEQIAWMTSNPPVPVGEIYKRWIILGLNKIVRMYSPVSILDIRQGPKEPFRDYVDRFYKTLRAEQASLEVKNWMTETLLVQNANPDCKTILKALGPGANLEEMMTACQGVGGPGHKARVLAEAMSQVTGSATIMMQKGNFGNQRRIVKCFNCGKDGHIAKNCRAPRKKGCWKCGKEGHQMKDCDGRQXNFLGKIWPSHKGRPGNFLQNRPEPTAPPEPTAPPAESFQFGEEMNPPQKQEGTDKGQGYPPLASLKSLFGSDPLLQ

SEQ ID NO: 686 - protein, 503 aa, Human immunodeficiency virus
  misc_feature (435)..(435): Xaa can be any naturally occurring amino acid
  misc_feature (470)..(470): Xaa can be any naturally occurring amino acid
MGARASVLSAGDLDKWEKIRLRPGGKKKYRLKHIVWASRELERFAVNPGLLETSGGCRQILGQLQPSLQTGSEELKSLYNTIAVLYCVHQKIEVKDTKEALDKIEEEQNKSKQKTQQAAAATGSSSQVSQNYPIVQNMQGAMVHQPMSPRTLNAWVKVIEEKAFSPEVIPMFVALSEGATPQDLNTMLNTVGGHQAAMQMLKETINEEAAEWDRTHPVHAGPVAPGQMREPRGSDIAGTTSTLQEQIAWMTSNPPVQVGEIYKRWIVLGLNKIVRMYSPTSILDIKQGPKEPFRDYVDRFYKTLRAEQATQEVKNWMTETLLVQNANPDCKTILKALGPAATLEEMMTACQGVGGPGHKARVLAEAMSQVTNSTAIMMQRGNFRNQRKTVKCFNCGKEGHLARNCRAPRKKGCWKCGKEGHQMKDCTERQANFLXKIWPSYKGRPGNFLQSRPEPTAPPAPPEESFRFGXETTTPPQKQEPIDKDLYPLASLRSLFGNDPSSQ

SEQ ID NO: 687 - protein, 510 aa, Human immunodeficiency virus
  misc_feature (25)..(25): Xaa can be any naturally occurring amino acid
  misc_feature (56)..(56): Xaa can be any naturally occurring amino acid
  misc_feature (61)..(61): Xaa can be any naturally occurring amino acid
  misc_feature (88)..(88): Xaa can be any naturally occurring amino acid
  misc_feature (328)..(328): Xaa can be any naturally occurring amino acid
MGARASVLSGGELDKWEKIRLRPGXKKKYKLKHIVWASRELERFAVNPGLLETAGXCRQIXEQLQPSLQTGSEELKSLYNTVATLYCXHQKIEVKDTKEALDKVEEERNKSKKKAQQAAADTGSNSNQVSQNYPIVQNLQGQMVHQAISPRTLNAWVKVVEEKAFSPEVIPMFSALSEGATPQDLNTMLNTVGGHQAAMQMLKETINEEAAEWDRLHPVHAGPVAPGQMREPRGSDIAGTTSTLQEQIAWMTSNPPIPVGEIYKRWIILGLNKIVRMYSPTSILDIKQGPKEPFRDYVDRFYRTLRAEQASQDVKNWMTETLLVQNAXPDCKTILKALGPAASLEEMMTACQGVGGPGHKARVLAEAMSQVTNSATIMMQKGNFRSQGKTVKCFNCGKEGHIARNCRAPRKKGCWKCGREGHQMKDCTERQANFLGKIWPSHKGRPGNFLQNRPEPTAPQSRTEPTAPPEESFRFGEETTTPHQKQEPIDKELYPLASLKSLFGNDPLSQ

SEQ ID NO: 688 - protein, 502 aa, Human immunodeficiency virus
  misc_feature (165)..(165): Xaa can be any naturally occurring amino acid
  misc_feature (179)..(179): Xaa can be any naturally occurring amino acid
  misc_feature (181)..(181): Xaa can be any naturally occurring amino acid
  misc_feature (190)..(190): Xaa can be any naturally occurring amino acid
  misc_feature (201)..(201): Xaa can be any naturally occurring amino acid
  misc_feature (231)..(231): Xaa can be any naturally occurring amino acid
  misc_feature (242)..(242): Xaa can be any naturally occurring amino acid
  misc_feature (245)..(245): Xaa can be any naturally occurring amino acid
  misc_feature (247)..(247): Xaa can be any naturally occurring amino acid
  misc_feature (279)..(279): Xaa can be any naturally occurring amino acid
  misc_feature (309)..(309): Xaa can be any naturally occurring amino acid
  misc_feature (313)..(313): Xaa can be any naturally occurring amino acid
  misc_feature (331)..(331): Xaa can be any naturally occurring amino acid
  misc_feature (362)..(362): Xaa can be any naturally occurring amino acid
  misc_feature (378)..(378): Xaa can be any naturally occurring amino acid
  misc_feature (383)..(383): Xaa can be any naturally occurring amino acid
  misc_feature (390)..(390): Xaa can be any naturally occurring amino acid
  misc_feature (420)..(420): Xaa can be any naturally occurring amino acid
  misc_feature (429)..(429): Xaa can be any naturally occurring amino acid
  misc_feature (449)..(449): Xaa can be any naturally occurring amino acid
  misc_feature (475)..(475): Xaa can be any naturally occurring amino acid
MGARASVLSAGELDKWEKIRLRPGGKKKYRLKHIVWASRELERFAVNPGLLETSEGCRQILEQLQPSLQTGSEELRSLFNTVATLYCVHQKIEVKDTKEALDKIEEEQNKSKKKTQQAAAAADTGNKLQVSQNYPIVQNLQGQMVHQALSPRTLNAWVKVIEEKXFSPEVIPMFTALSXGXTPQDLNTMXNTVGGHQAAMXMLKETINEEAAEWDRLHPVQAGPVAPGQLXEPRGSDIAGTXSNXQXQIAWMTHNPPIPVGEIYKRWIILGLNKIVRMXSPISILEIRQGPKEPFRDYVDRFYKTLRAXQASXEVKNWMTETLLVQNANPXCKTILKALGPGATLEEMMTACQGVGGPAHKXRVLAEAMSQVTNSNAXMMQRXNFRNQRXPVKCFNCGKEGHIARNCRAPRKKGCWKCGXEGHQMKDCXERQANFLGKIWPSHKGRPGXFLQSRPEPSAPPEESFRFGEETTTPXQKQGAIDKELYPLTSLRSLFGNDPSSQ

SEQ ID NO: 689 - protein, 501 aa, Human immunodeficiency virus
MGARASVLSGGELDRWEKIRLRPGGRKKYRLKHIVWASRELERFAVNPGLLETSEGCRQILGQLQPSLQTGSEELRSLYNTVATLYCVHQKIDVKDTKEALDKIEEEQNKSKKKAQQAAADSKQGSGSVSQNYPIVQNLQGQMVHQAISPRTLNAWVKVIEEKAFSPEVIPMFSALSEGATPQDLNTMLNTVGGHQAAMQMLKETINEEAAEWDRLHPVHAGPIAPGQMREPRGSDIAGTTSTLQEQIGWMTNNPPIPVGEIYKRWIILGLNKIVRMYSPISILDIKQGPKEPFRDYVDRFYKTLRAEQATQEVKNWMTETLLVQNANPDCKTILKALGPAATLEEMMTACQGVGGPGHKARVLAEAMSQMTNSATIMMQKGNFRNQRKSVKCFNCGKEGHIAKNCRAPRRRGCWKCGKEGHQMKDCTERQANFLGKIWPSHKGRPGNFLQSRPEPTAPPAESFKFGEETTTPPQKQETGDKELYPLASLRSLFGNDPLSQ

SEQ ID NO: 690 - protein, 505 aa, Human immunodeficiency virus
MGARASVLSGGQLDRWEKIRLRPGGKKQYKLKHIVWASRELERFAVNPGLLETAEGCRQILGQLQPSLQTGSEELRSLFNTVATLYCVHQRIDVKDTKEALDKIEEEQNKSKKQAQQAAAAADTGNSSKVSQNYPIVQNLQGQMVHQPISPRTLNAWVKVVEEKAFSPEVIPMFTALSEGATPQDLNTMLNTVGGHQAAMQMLKETINEEAAEWDRLHPVQAGPIAPGQIREPRGSDIAGTTSTLQEQITWMTNNPPIPVGEIYKRWIVLGLNKIVRMYSPTSILDIKQGPKEPFRDYVDRFYRTLRAEQASQEVKNWMTETLLVQNANPDCKTILKALGPGATLEEMMSACQGVGGPGHKARVLAEAMSQVNSSAIMMQRGNFRNQRKTVKCFNCGKEGHIAKNCRAPRKKGCWKCGKEGHQMKDCTERQANFLGKIWPSHKGRPGNFLQSRPESRPEPTAPPEESFRFGEETTTPPQKQDTIEKELYPLASLRSLFGSDPSSQ

SEQ ID NO: 691 - protein, 500 aa, Artificial Sequence
  Tailored vaccine antigen episensus sequence
MGARASVLSGGELDRWEKIRLRPGGKKKYKLKHIVWASRELERFAVNPGLLETSEGCRQILGQLQPSLQTGSEELKSLYNTVATLYCVHQKIEVKDTKEALDKIEEEQNKSKKKAQQAAADTGNSSQVSQNYPIVQNLQGQMVHQAISPRTLNAWVKVVEEKAFSPEVIPMFSALSEGATPQDLNTMLNTVGGHQAAMQMLKETINEEAAEWDRLHPVHAGPIAPGQMREPRGSDIAGTTSTLQEQIGWMTNNPPIPVGEIYKRWIILGLNKIVRMYSPTSILDIRQGPKEPFRDYVDRFYKTLRAEQASQEVKNWMTETLLVQNANPDCKTILKALGPAATLEEMMTACQGVGGPGHKARVLAEAMSQVTNSATIMMQRGNFRNQRKTVKCFNCGKEGHIARNCRAPRKKGCWKCGKEGHQMKDCTERQANFLGKIWPSHKGRPGNFLQSRPEPTAPPEESFRFGEETTTPSQKQEPIDKELYPLASLRSLFGNDPSSQ

SEQ ID NO: 692 - protein, 502 aa, Artificial Sequence
  Tailored vaccine antigen 1 sequence
MGARASVLSGGELDKWEKIRLRPGGKKKYRLKHIVWASRELERFAVNPGLLETSGGCRQILEQLQPSLQTGSEELRSLYNTVATLYCVHQKIDVKDTKEALEKIEEEQNKSKKKAQQAAAAADTGNNSQVSQNYPIVQNMQGQMVHQALSPRTLNAWVKVIEEKAFSPEVIPMFTALSEGATPQDLNTMLNSVGGHQAAMQMLKETINEEAAEWDRVHPVHAGPVAPGQMREPRGSDIAGTTSTLQEQIGWMTSNPPIPVGEIYKRWIIMGLNKIVRMYSPTSILDIKQGPKEPFRDYVDRFYKTLRAEQATQEVKNWMTETLLVQNSNPDCKTILKALGPGATLEEMMTACQGVGGPSHKARVLAEAMSQATNSATIMMQKGNFRNQRKIVKCFNCGKEGHIAKNCRAPRKKGCWKCGREGHQMKDCTERQVNFLGKIWPSHKGRPGNFLQNRPEPTAPPAESFRFGEETTTPPQKQEPIDKELYPLASLKSLFGNDPSSQ

SEQ ID NO: 693 - protein, 500 aa, Artificial Sequence
  Tailored vaccine antigen 2 sequence
MGARASVLSGGKLDKWEKIRLRPGGKKRYKLKHIVWASRELERFAVNPGLLETAEGCRQILGQLQPALQTGSEELKSLFNTVATLYCVHQRIDVKDTKEALEKIEEEQNKSKKKAQPAAADTGSSSQVSQNYPIVQNMQGQMVHQAISPRTLNAWVKVIEEKAFSPEVIPMFAALSEGATPQDLNLMLNTVGGHQAAMQMLKETINEEAAEWDRLHPVHAGPVAPGQMREPRGSDIAGTTSTLQEQIGWMTHNPPIPVGEIYKKWIIMGLNKIVRMYSPTSILDIKQGPKEPFRDYVDRFYKTLRAEQATQEVKNWMTETLLVQNSNPDCKTILKALGPGATLEEMMTACQGVGGPSHKARVLAEAMSQATNSATIMMQRGNFKNQRKTIKCFNCGKEGHIAKNCRAPRKKGCWKCGREGHQMKDCTERQANFLGKIWPSHKGRPGNFLQNRPEPTAPPAESFRFGEETTTPPQKQEPIDKELYPLASLKSLFGNDPSSQ

SEQ ID NO: 694 - protein, 502 aa, Artificial Sequence
  Tailored vaccine antigen 3 sequence
MGARASVLSGGELDKWEKIRLRPGGKKKYRLKHIVWASRELERFAVNPGLLETAEGCRQILEQLQPSLQTGSEELRSLYNTVAVLYCVHQRIDVKDTKEALDKIEEEQNKSKKKAQQAAAAADTGNNSQVSQNYPIVQNLQGQMVHQPISPRTLNAWVKVIEEKAFSPEVIPMFTALSEGATPQDLNTMLNTVGGHQAAMQMLKDTINEEAAEWDRLHPVQAGPIAPGQIREPRGSDIAGTTSTLQEQIAWMTNNPPIPVGDIYKRWIILGLNKIVRMYSPTSILDIKQGPKEPFRDYVDRFYKTLRAEQASQDVKNWMTETLLVQNSNPDCKTILKALGPGATLEEMMTACQGVGGPSHKARVLAEAMSQATNSATIMMQKGNFRNQRKIVKCFNCGKEGHIAKNCRAPRKKGCWKCGREGHQMKDCTERQANFLGKIWPSSKGRPGNFLQSRPEPTAPPAESFRFGEETTTPPQKQEPIDKELYPLASLKSLFGNDPSSQ

SEQ ID NO: 695 - protein, 501 aa, Artificial Sequence
  Tailored vaccine antigen 4 sequence
MGARASVLSGGKLDKWEKIRLRPGGKKKYRLKHIVWASRELERFAVNPGLLETAEGCRQILGQLQPALQTGSEELRSLYNTVATLYCVHQRIEVKDTKEALEKIEEEQNKSKKKVQQAAAADTGNSNQVSQNYPIVQNIQGQMVHQPLSPRTLNAWVKVIEEKAFSPEVIPMFTALSEGATPQDLNTMLNTIGGHQAAMQMLKETINEEAADWDRLHPVHAGPVAPGQMREPRGSDIAGTTSNLQEQIGWMTSNPPIPVGEIYKRWIIMGLNKIVRMYSPTSILDIKQGPKEPFRDYVDRFYKTLRAEQASQDVKNWMTETLLVQNSNPDCKTILKALGPGATLEEMMTACQGVGGPSHKARVLAEAMSQVTNSATIMMQKGNFRNQRKIVKCFNCGKEGHIAKNCRAPRKRGCWKCGKEGHQMKECTERQANFLGKIWPSYKGRPGNFLQSRPEPSAPPEESFRFGEETATPSQKQEPIDKELYPLASLKSLFGNDPSSQ

SEQ ID NO: 696 - protein, 500 aa, Artificial Sequence
  Tailored vaccine antigen 5 sequence
MGARASVLSGGKLDKWEKIRLRPGGKKQYKLKHLVWASRELERFAVNPGLLETAEGCRQILGQLQPALQTGSEELKSLFNTVATLYCVHQRIDVKDTKEALEKIEEEQNKSKKKAQQAAADTGNNSQVSQNYPIVQNIQGQMVHQALSPRTLNAWVKVIEEKAFSPEVIPMFSALAEGATPQDLNTMLNTVGGHQAAMQILKETINEEAAEWDRLHPVQAGPVAPGQMREPRGSDIAGTTSNLQEQIAWMTHNPPIPVGEIYKRWIIMGLNKIVRMYSPVSILDIRQGPKEPFRDYVDRFYKTLRAEQASQDVKNWMTETLLVQNSNPDCKTILKALGPGATLEEMMTACQGVGGPSHKARVLAEAMSQATNPATIMMQRGNFKNQRKIVKCFNCGKEGHIAKNCRAPRKKGCWKCGKEGHQMKECTERQANFLGKIWPSYKGRPGNFLQSRPEPSAPPEESFRFGEETTTPPQKQEPIDKELYPLTSLRSLFGNDPSSQ

SEQ ID NO: 697 - protein, 500 aa, Artificial Sequence
  EpiGraph antigen 1 sequence
MGARASVLSGGELDRWEKIRLRPGGKKKYKLKHIVWASRELERFAVNPGLLETSEGCRQILGQLQPSLQTGSEELKSLYNTVATLYCVHQRIDVKDTKEALDKIEEEQNKSKKKAQQAAADTGNSSQVSQNYPIVQNLQGQMVHQAISPRTLNAWVKVVEEKAFSPEVIPMFSALSEGATPQDLNTMLNTVGGHQAAMQMLKETINEEAAEWDRLHPVHAGPIAPGQMREPRGSDIAGTTSTLQEQIGWMTNNPPIPVGEIYKRWIILGLNKIVRMYSPTSILDIRQGPKEPFRDYVDRFYKTLRAEQASQEVKNWMTETLLVQNANPDCKTILKALGPAATLEEMMTACQGVGGPGHKARVLAEAMSQVTNSATIMMQRGNFRNQRKTVKCFNCGKEGHIARNCRAPRKKGCWKCGKEGHQMKDCTERQANFLGKIWPSHKGRPGNFLQSRPEPTAPPEESFRFGEETTTPSQKQEPIDKELYPLASLRSLFGNDPSSQ

SEQ ID NO: 698 - protein, 500 aa, Artificial Sequence; identical to SEQ ID NO: 697
  Epigraph cocktail antigen 1

SEQ ID NO: 699 - protein, 502 aa, Artificial Sequence
  Epigraph cocktail antigen 2
MGARASVLSGGKLDKWEKIRLRPGGKKKYRLKHIVWASRELERFALNPGLLETAEGCRQILGQLQPALQTGSEELKSLFNTVATLYCVHQKIDVKDTKEALEKIEEEQNKSKKKAQQAAAAADTGNNSQVSQNYPIVQNMQGQMVHQALSPRTLNAWVKVIEEKAFSPEVIPMFTALSEGATPQDLNLMLNTVGGHQAAMQILKETINEEAADWDRLHPVHAGPVAPGQMREPRGSDIAGTTSNLQEQIGWMTSNPPIPVGEIYKRWIIMGLNKIVRMYSPVSILDIKQGPKEPFRDYVDRVYKTLRAEQASQDVKNWMTETLLVQNSNPDCKTILKALGPGATLEEMMTACQGVGGPSHKARVLAEAMSQATNSATIMMQKGNFRNQRKIVKCFNCGKEGHIAKNCRAPRKRGCWKCGKEGHQMKECTERQANFLGKIWPSYKGRPGNFLQNRPEPTAPPAESFRFGEETTTPPQKQEPIDKELYPLASLKSLFGNDPSSQ

SEQ ID NO: 700 - protein, 500 aa, Artificial Sequence
  Epigraph cocktail antigen 3
ARASVLSGGELDKWEKIRLRPGGKKQYKLKHLVWASRELERFAINPGLLETSGGCRQILEQLQPSLQTGSEELRSLYNTVAVLYCVHQRIEVKDTKEALEKVEEEQNKSKKKVQQAAADTGNSNQVSQNYPIVQNIQGQMVHQPISPRTLNAWVKVIEDKAFSPEVIPMFAALSEGATPQDLNTMLNTIGGHQAAMQMLKDTINEEAAEWDRLHPVQAGPVAPGQMRDPRGSDIAGTTSTLQEQIAWMTNNPPIPVGDIYKRWIILGLNKIVRMYSPTSILDIKQGPKESFRDYVDRFYKTLRAEQATQEVKNWMTETLLVQNANPDCRTILKALGPAATLEEMMSACQGVGGPSHKARILAEAMSQVTNSTAIMMQRGNFKNQRKTVKCFNCGREGHIAKNCRAPRKKGCWKCGREGHQMKDCTERQRQANFLGKIWPSSKGRPGNFLQSRPEPSAPPEESFRFGEETATPSQKQEPIDKELYPLTSLRSLFGNDPSLQ

SEQ ID NO: 701 - protein, 705 aa, Artificial Sequence
  HIV B gag/nef fusion Epigraph 1
MGARASVLSGGELDRWEKIRLRPGGKKKYRLKHIVWASRELERFAVNPGLLETSEGCRQILGQLQPSLQTGSEELKSLYNTVATLYCVHQRIEVKDTKEALDKIEEEQNKSKKKAQQAAADTGNSSQVSQNYPIVQNLQGQMVHQAISPRTLNAWVKVVEEKAFSPEVIPMFSALSEGATPQDLNTMLNTVGGHQAAMQMLKETINEEAAEWDRLHPVHAGPIAPGQMREPRGSDIAGTTSTLQEQIGWMTNNPPIPVGEIYKRWIILGLNKIVRMYSPTSILDIRQGPKEPFRDYVDRFYKTLRAEQASQEVKNWMTETLLVQNANPDCKTILKALGPAATLEEMMTACQGVGGPGHKARVLAEAMSQVTNSATIMMQRGNFRNQRKTVKCFNCGKEGHIAKNCRAPRKKGCWKCGKEGHQMKDCTERQANFLGKIWPSHKGRPGNFLQSRPEPTAPPEESFRFGEETTTPSQKQEPIDKELYPLASLKSLFGNDPSSQGGKWSKSSIVGWPAVRERMRRAEPAAEGVGAVSRDLEKHGAITSSNTAATNADCAWLEAQEEEEVGFPVRPQVPLRPMTYKGALDLSHFLKEKGGLEGLIYSQKRQDILDLWVYHTQGYFPDWQNYTPGPGIRYPLTFGWCFKLVPVEPEKVEEANEGENNSLLHPMSQHGMDDPEKEVLMWKFDSRLAFHHMARELHPEYYKDC

SEQ ID NO: 702 - protein, 706 aa, Artificial Sequence
  HIV B gag/nef fusion Epigraph 2
MGARASVLSGGKLDKWEKIRLRPGGKKKYKLKHIVWASRELERFALNPGLLETSEGCKQILGQLQPALQTGSEELRSLYNTVAVLYCVHQRIDVKDTKEALEKIEEEQNKCKKKAQQAAAAADTGNNSQVSQNYPIVQNMQGQMVHQALSPRTLNAWVKVIEEKAFSPEVIPMFTALSEGATPQDLNTMLNTIGGHQAAMQMLKDTINEEAAEWDRVHPVHAGPVAPGQMREPRGSDIAGTTSNLQEQIAWMTHNPPIPVGEIYKRWIIMGLNKIVRMYSPVSILDIKQGPKEPFRDYVDRFYRTLRAEQASQDVKNWMTETLLVQNSNPDCKTILKALGPGATLEEMMTACQGVGGPSHKARVLAEAMSQVTNSATIMMQKGNFRNQRKIVKCFNCGKEGHIARNCRAPRKRGCWKCGKEGHQMKECTERQANFLGKIWPSYKGRPGNFLQNRPEPTAPPAESFRFGEETATPPQKQEPIDKEMYPLASLRSLFGNDPSQGGKWSKRSVPGWNTIRERMRRTEPAAEGVGAASRDLERHGAITSSNTAANNAACAWLEAQEDEEVGFPVKPQVPLRPMTYKAAVDLSHFLKEKGGLEGLIHSQKRQEILDLWVYNTQGYFPDWHNYTPGPGTRFPLTFGWCFKLVPVDPEQVEKANEGENNCLLHPMSLHGMDDPEREVLVWKFDSRLAFHHVAREKHPEYYKDC

SEQ ID NO: 703 - protein, 992 aa, Artificial Sequence
  HIV B pol Epigraph 1
MFFRENLAFPQGKAREFSSEQTRANSPTRRELQVWGRDNNSLSEAGADRQGTVSFSFPQITLWQRPLVTIKIGGQLKEALLADDTVLEEMNLPGRWKPKMIGGIGGFIKVRQYDQIPIEICGHKAIGTVLVGPTPVNIIGRNLLTQIGCTLNFPISPIETVPVKLKPGMDGPKVKQWPLTEEKIKALVEICTEMEKEGKISKIGPENPYNTPVFAIKKKDSTKWRKLVDFRELNKRTQDFWEVQLGIPHPAGLKKKKSVTVLDVGDAYFSVPLDKDFRKYTAFTIPSINNETPGIRYQYNVLPQGWKGSPAIFQSSMTKILEPFRKQNPDIVIYQLYVGSDLEIGQHRTKIEELRQHLLRWGFTTPDKKHQKEPPFLWMGYELHPDKWTVQPIVLPEKDSWTVNDIQKLVGKLNWASQIYAGIKVKQLCKLLRGTKALTEVVPLTEEAELELAENREILKEPVHGVYYDPSKDLIAEIQKQGQGQWTYQIYQEPFKNLKTGKYARMRGAHTNDVKQLTEAVQKIATESIVIWGKTPKFKLPIQKETWEAWWTEYWQATWIPEWEFVNTPPLVKLWYQLEKEPIVGAETFYVDGAANRETKLGKAGYVTDRGRQKVVSLTDTTNQKTQAIHLALQDSGLEVNIVTDSQYALGIIQAQPDKSESELVSQIIEQLIKKEKVYLAWVPAHKGIGGNEQVDKLVSAGIRKVLFLDGIDKAQEEHEKYHSNWRAMASDFNLPPVVAKEIVASCDKCQLKGEAMHGQVDCSPGIWQLCTHLEGKIILVAVHVASGYIEAEVIPAETGQETAYFLLKLAGRWPVKTIHTNGSNFTSTTVKAACWWAGIKQEFGIPYNPQSQGVVSMNKELKKIIGQVRDQAEHLKTAVQMAVFIHNFKRKGGIGGYSAGERIVDIIATDIQTKELQKQITKIQNFRVYYRDSRDPLWKGPAKLLWKGEGAVVIQDNSDIKVVPRRKAKIIRDYGKQMAGDDCVASRQDED

SEQ ID NO: 704 - protein, 993 aa, Artificial Sequence
  HIV B pol Epigraph 2
MFFREDLAFPQGEAREFPSEQTRANSPTSRELQVWGGDNNSPSEAGADRQGTVSLSFPQITLWQRPLVTVKIGGQLKEALLADDTVLEEMSLPGKWKPKMIGGIGGFIKVRQYDQVPIEICGHKTIGTVLIGPTPVNIIGRNLLTQLGCTLNFPISPIETVPVKLKPGMDGPRVKQWPLTEEKIKALIEICTEMEKEGKISRIGPENPYNTPIFAIKKKDSTKWRKLVDFRELNKKTQDFWEVQLGIPHPSGLKKKKSVTVLDVGDAYFSVPLDKEFRKYTAFTIPSTNNETPGIRYQYNVLPQGWKGSPAIFQCSMTKILEPFRKQNPEIVIYQLYVGSDLEIGQHRAKIEELRQHLLKWGFTTPDKKHQKEPPFLWMGYELHPDKWTVQPIELPEKDSWTVNDIQKLVGKLNWASQIYPGIKVRQLCKLLRGAKALTEVIPLTKEAELELAENREILREPVHGVYYDPTKDLIAEIQKQGLGQWTYQIYQEPFKNLKTGKYARTRGAHTNDVRQLTEAVQKITTESIVIWGKTPKFRLPIQKETWETWWTEYWQATWIPEWEFVNTPPLVKLWYQLEKEPIIGAETFYVDGASNRETKLGKAGYVTNRGRQKVISLTDTTNQKTLQAIYLALQDSGSEVNIVTDSQYALGIIQAQPDQSESELVNQIIEQLINKEKVYLAWVPAHKGIGGNEQVDKLVSTGIRKVLFLDGIDRAQEEHEKYHNNWRAMASDFNLPPIVAKEIVASCDKCQLKGEAIHGQVDCSPGIWQLCTHLEGKVILVAVHVASGYIEAEVIPAETGQETAYFILKLAGRWPVKTVHTNGSNFTSATVKAACWWAGVKQEFGIPYNPQSQGVVSMNNELKKIIGQIRDQAEHLKTAVQMAVFIHNFKRKGGIGEYSAGERIIDIIATDIQTRELQKQITKIQNFRVYYRDNRDPLWKGPAKLLWKGEGAVVIQDNSEIKVVPRRKVKIIRDYGKQMAGDDCVAGRQDED

SEQ ID NO: 705 - protein, 704 aa, Artificial Sequence
  HIV M gag/nef fusion Epigraph 1
MGARASVLSGGKLDAWEKIRLRPGGKKKYRLKHLVWASRELERFALNPGLLETSEGCRQILGQLQPSLQTGSEELKSLYNTVATLYCVHQRIEVKDTKEALDKIEEEQNKSKKKAQQAAADTGNSSQVSQNYPIVQNLQGQMVHQAISPRTLNAWVKVVEEKAFSPEVIPMFSALSEGATPQDLNTMLNTVGGHQAAMQMLKETINEEAAEWDRLHPVHAGPIAPGQMREPRGSDIAGTTSTLQEQIGWMTNNPPIPVGEIYKRWIILGLNKIVRMYSPVSILDIRQGPKEPFRDYVDRFYKTLRAEQATQEVKNWMTETLLVQNANPDCKTILKALGPAATLEEMMTACQGVGGPGHKARVLAEAMSQVTNSATIMMQRGNFKGQKRIKCFNCGKEGHIARNCRAPRKKGCWKCGKEGHQMKDCTERQANFLGKIWPSHKGRPGNFLQSRPEPTAPPEESFRFGEETTTPSQKQEPIDKELYPLASLKSLFGNDPLSQGGKWSKSSIVGWPAVRERMRRAEPAAEGVGAVSRDLEKHGAITSSNTAATNADCAWLEAQEEEEVGFPVRPQVPLRPMTYKGALDLSHFLKEKGGLEGLIYSKKRQEILDLWVYHTQGYFPDWQNYTPGPGIRYPLTFGWCFKLVPVDPREVEEANEGENNCLLHPMSQHGMDDPEKEVLMWKFDSRLAFHHMARELHPEYYKDC

SEQ ID NO: 706 - protein, 314 aa, Artificial Sequence
  HIV M gag/nef conserved Epigraph 1
MPIVQNLQGQMVHQAISPRTLNAWVKVVEEKAFSPEVIPMFSALSEGATPQDLNTMLNTVGGHQAAMQMLKETINEEAAEWDRLHPVHAGPIAPGQMREPRGSDIAGTTSTLQEQIGWMTNNPPIPVGEIYKRWIILGLNKIVRMYSPVSILDIRQGPKEPFRDYVDRFYKTLRAEQATQEVKNWMTETLLVQNANPDCKTILKALGPAATLEEMMTACQGVGGPGHKARVLVGFPVRPQVPLRPMTYKGALDLSHFLKEKGGLEGLIYSKKRQEILDLWVYHTQGYFPDWQNYTPGPGIRYPLTFGWCFKLVP

SEQ ID NO: 707 - protein, 701 aa, Artificial Sequence
  HIV M gag/nef fusion Epigraph 2
MGARASVLSGGELDRWEKIRLRPGGKKKYKLKHIVWASRELERFAVNPGLLETAEGCQQIIEQLQSTLKTGSEELKSLFNTVAVLYCVHQRIDVKDTKEALEKIEEEQNKSQQKTQQAAAGTGSSSKVSQNYPIVQNAQGQMVHQPLSPRTLNAWVKVIEEKAFSPEVIPMFTALSEGATPQDLNMMLNIVGGHQAAMQMLKDTINEEAAEWDRVHPVHAGPIPPGQMREPRGSDIAGTTSNLQEQIGWMTSNPPIPVGDIYKRWIILGLNKIVRMYSPTSILDIKQGPKEPFRDYVDRFFKTLRAEQASQEVKNWMTDTLLVQNANPDCKTILRALGPGATLEEMMTACQGVGGPSHKARVLAEAMSQVTNSATIMMQRGNFRNQRKTVKCFNCGKEGHLARNCRAPRKKGCWKCGREGHQMKDCNERQANFLGKIWPSNKGRPGNFPQSRPEPTAPPAESFRFEETTPAPKQEPKDREPLTSLKSLFGSDPLSQGSKWSKSSIVGWPAIRERMRRTEPAAEGVGAASRDLERHGAITSSNTAANNADCAWLEAQEDEEVGFPVKPQVPLRPMTYKAAFDLSFFLKEKGGLDGLIYSQKRQDILDLWVYNTQGFFPDWQNYTPGPGVRYPLTFGWCFKLVPVEPEKVEEANEGENNSLLHPMSLHGMDDPEREVLMWKFDSSLARRHMARELHPEFYKDC

SEQ ID NO: 708 - protein, 314 aa, Artificial Sequence
  HIV M gag/nef conserved Epigraph 2
MPIVQNAQGQMVHQPLSPRTLNAWVKVIEEKAFSPEVIPMFTALSEGATPQDLNMMLNIVGGHQAAMQMLKDTINEEAAEWDRVHPVHAGPIPPGQMREPRGSDIAGTTSNLQEQIGWMTSNPPIPVGDIYKRWIILGLNKIVRMYSPTSILDIKQGPKEPFRDYVDRFFKTLRAEQASQEVKNWMTDTLLVQNANPDCKTILRALGPGATLEEMMTACQGVGGPSHKARVLVGFPVKPQVPLRPMTYKAAFDLSFFLKEKGGLDGLIYSQKRQDILDLWVYNTQGFFPDWQNYTPGPGVRYPLTFGWCFKLVP

SEQ ID NO: 709 - protein, 994 aa, Artificial Sequence
  HIV M pol Epigraph 1
MFFRENLAFPQGEAREFSSEQTRANSPTRRELQVWGRDNNSLSEAGADRQGTVSFSFPQITLWQRPLVTIKIGGQLKEALLADDTVLEDINLPGKWKPKMIGGIGGFIKVRQYDQILIEICGKKAIGTVLVGPTPVNIIGRNLLTQIGCTLNFPISPIETVPVKLKPGMDGPKVKQWPLTEEKIKALVEICTEMEKEGKISKIGPENPYNTPVFAIKKKDSTKWRKLVDFRELNKRTQDFWEVQLGIPHPAGLKKKKSVTVLDVGDAYFSVPLDKDFRKYTAFTIPSINNETPGIRYQYNVLPQGWKGSPAIFQSSMTKILEPFRKQNPDIVIYQLYVGSDLEIGQHRTKIEELRQHLLKWGFTTPDKKHQKEPPFLWMGYELHPDKWTVQPIVLPEKDSWTVNDIQKLVGKLNWASQIYPGIKVKQLCKLLRGAKALTDIVPLTEEAELELAENREILKEPVHGVYYDPSKDLIAEIQKQGQDQWTYQIYQEPFKNLKTGKYARMRGAHTNDVKQLTEAVQKIATESIVIWGKTPKFRLPIQKETWETWWTEYWQATWIPEWEFVNTPPLVKLWYQLEKEPIVGAETFYVDGAANRETKLGKAGYVTDRGRQKVVSLTETTNQKTLQAIHLALQDSGSEVNIVTDSQYALGIIQAQPDKSESELVNQIIEQLIKKEKVYLSWVPAHKGIGGNEQVDKLVSSGIRKVLFLDGIDKAQEEHEKYHSNWRAMASDFNLPPIVAKEIVASCDKCQLKGEAMHGQVDCSPGIWQLCTHLEGKVILVAVHVASGYIEAEVIPAETGQETAYFLLKLAGRWPVKVIHTNGSNFTSAAVKAACWWAGIKQEFGIPYNPQSQGVVSMNKELKKIIGQVRDQAEHLKTAVQMAVFIHNFKRKGGIGGYSAGERIIDIIATDIQTKELQKQITKIQNFRVYYRDSRDPIWKGPAKLLWKGEGAVVIQDNSDIKVVPRRKAKIIRDYGKQMAGDDCVAGRQDEDQ

SEQ ID NO: 710 - protein, 599 aa, Artificial Sequence
  HIV M pol conserved Epigraph 1
MPQITLWQRPLVTIKIGGQLKEALLADDTVLEDINLPGKWKPKMIGGIGGFIKVRQYDQILIEICGKKAIGTVLVGPTPVNIIGRNLLTQIGCTLNFPISPIETVPVKLKPGMDGPKVKQWPLTEEKIKALVEICTEMEKEGKISKIGPENPYNTPVFAIKKKDSTKWRKLVDFRELNKRTQDFWEVQLGIPHPAGLKKKKSVTVLDVGDAYFSVPLDKDFRKYTAFTIPSINNETPGIRYQYNVLPQGWKGSPAIFQSSMTKILEPFRKQNPDIVIYQLYVGSDLEIGQHRTKIEELRQHLLKWGFTTPDKKHQKEPPFLWMGYELHPDKWTVQPIVLPEKDSWTVNDIQKLVGKLNWASQIYHGQVDCSPGIWQLCTHLEGKVILVAVHVASGYIEAEVIPAETGQETAYFLLKLAGRWPVKVIHTNGSNFTSAAVKAACWWAGIKQEFGIPYNPQSQGVVSMNKELKKIIGQVRDQAEHLKTAVQMAVFIHNFKRKGGIGGYSAGERIIDIIATDIQTKLQKQITKIQNFRVYYRDSRDPIWKGPAKLLWKGEGAVVIQDNSDIKVVPRRKAKIIRDYGKQMAGDDCVAGRQDEDQ

SEQ ID NO: 711 - protein, 993 aa, Artificial Sequence
  HIV M pol Epigraph 2
MFFREDLAFPQGKAREFPSEQTRANSPTRGELQVWGGDNNSPSEAGADRQGTVSFSFPQITLWQRPLVSIKVGGQIKEALLADDTVLEEMNLPGRWKPKMIGGIGGFIKVRQYDQIPIEICGHKAIGTVLIGPTPVNIIGRNMLTQLGCTLNFPISPIDTVPVTLKPGMDGPRVKQWPLTEEKIKALTEICKEMEKEGKITKIGPENPYNTPIFAIKKKDSTKWRKLVDFRELNKKTQDFWEVQLGIPHPAGLKKKKSVTVLDVGDAYFSVPLDESFRKYTAFTIPSTNNETPGIRYQYNVLPQGWKGSPAIFQCSMTKILEPFRIKNPEIVIYQLYVGSDLEIGQHRAKIEELREHLLRWGFTTPDKKHQKEPPFLWMGYELHPDRWTVQPIELPEKDSWTVNDIQKLVGKLNWASQIYAGIKVRQLCKLLRGTKALTEVVPLTEEAELELAENREILKTPVHGVYYDPSKDLVAEIQKQGQGQWTYQIYQEPYKNLKTGKYARKRSAHTNDVRQLTEVVQKIATESIVIWGKTPKFKLPIQKETWEAWWTDYWQATWIPDWEFVNTPPLVKLWYQLEKDPIVGAETFYVDGAASRETKLGKAGYVTNRGRQKVVSLTDTTNQKTLHAIHLALQDSGLEVNIVTDSQYALGIIQAQPDRSESEVVNQIIEELIKKEKVYLAWVPAHKGIGGNEQVDKLVSAGIRKVLFLDGIDKAQEEHERYHSNWRTMASDFNLPPVVAKEIVANCDKCQLKGEAIHGQVDCSPGMWQLCTHLEGKIILVAVHVASGYMEAEVIPAETGQETAYFILKLAGRWPVKTIHTNGSNFTSTTVKAACWWAGIQQEFGIPYNPQSQGVVSMNNELKKIIGQVREQAEHLKTAVQMAVFIHNFKRRGGIGGYSAGERIVDIIATDIQTRELQKQIIKIQNFRVYYRDSRDPLWKGPAKLLWKGEGAVVIQDNSEIKVVPRRKVKIIKDYGKQMAGDDCVASRQDED

SEQ ID NO: 712 - protein, 598 aa, Artificial Sequence
  HIV M pol conserved Epigraph 2
MPQITLWQRPLVSIKVGGQIKEALLADDTVLEEMNLPGRWKPKMIGGIGGFIKVRQYDQIPIEICGHKAIGTVLIGPTPVNIIGRNMLTQLGCTLNFPISPIDTVPVTLKPGMDGPRVKQWPLTEEKIKALTEICKEMEKEGKITKIGPENPYNTPIFAIKKKDSTKWRKLVDFRELNKKTQDFWEVQLGIPHPAGLKKKKSVTVLDVGDAYFSVPLDESFRKYTAFTIPSTNNETPGIRYQYNVLPQGWKGSPAIFQCSMTKILEPFRIKNPEIVIYQLYVGSDLEIGQHRAKIEELREHLLRWGFTTPDKKHQKEPPFLWMGYELHPDRWTVQPIELPEKDSWTVNDIQKLVGKLNWASQIYHGQVDCSPGMWQLCTHLEGKIILVAVHVASGYMEAEVIPAETGQETAYFILKLAGRWPVKTIHTNGSNFTSTTVKAACWWAGIQQEFGIPYNPQSQGVVSMNNELKKIIGQVREQAEHLKTAVQMAVFIHNFKRRGGIGGYSAGERIVDIIATDIQTRLQKQIIKIQNFRVYYRDSRDPLWKGPAKLLWKGEGAVVIQDNSEIKVVPRRKVKIIKDYGKQMAGDDCVASRQDED

SEQ ID NO: 713 - protein, 773 aa, Artificial Sequence
  SIV gag/nef hybrid
MGARGSVLSGKKTDELEKVRLRPGGRKKYMLKHIVWAARELDRFGSAESLLESKEGCQRILAVLAPLMPTGSEDLKSLFSTVCVVWCLHAEMKVKDTEEAKKTVQSHLVVESGTAETMPAQSRPTAPPSGRGGNYPVQQIGGNYVHLPLSPRTLNAWVKLIEEKKFGAEVVPGFQALSEGCTPYDINQMLNCVGDHQAAMQIIRDIINEEAADWDLQHPQPAPQQGQLREPSGSDIAGTTSSVDEQIQWMYRQQNPIPVGNIYRRWIQLGLQKCVRMYNPTNILDVKQGPKEPFQSYVDRFYKSLRAEQTDAAVKNWMTQTLLIQNANPDCKLVLKGLGVNPTLEEMLTACQGVGGPGQKARLMAEALKDALTPGPIPFAAVQQRGQRKIIKCWNCGKTGHSARQCKAPRRKGCWKCGKAGHVMAKCPERQAGFLGFGPWGKKPHNFPMAQMPQGLTPTAPPADPAVDMLKNYMKMGKRQREKQRENRERPYKEVSEDLLHLSSLFGEDQPGGATSKRRSKPSGDLRQKLLRARGENYGRLWGELEDGSSQSLGGLGKGLSSRSCEGQKYSQGQFMNTPWKNPAEEKEKLPYRKQNIDDVDEEDNDLVGVSVRPKVPLRTMSYKLAIDMSHFIKEKGGLEGIYYSARRHRILDIYLEKEEGIIPDWQDYTSGPGIRYPKTFGWLWKLVPVDMSNEAQEDDTHYLVHPAQTHQWSDPWGEVLVWKFDPLLAHTYEAFVRHPEEFGWKSGLPKEEVERRLAARGLLKMADKKETR

SEQ ID NO: 714 - protein, 312 aa, Artificial Sequence
  SIV gag/nef conserved
MPVQQIGGNYVHLPLSPRTLNAWVKLIEEKKFGAEVVPGFQALSEGCTPYDINQMLNCVGDHQAAMQIIRDIINEEAADWDLQHPQPAPQQGQLREPSGSDIAGTTSSVDEQIQWMYRQQNPIPVGNIYRRWIQLGLQKCVRMYNPTNILDVKQGPKEPFQSYVDRFYKSLRAEQTDAAVKNWMTQTLLIQNANPDCKLVLKGLGVNPTLEEMLTACQGVGGPGQKARLMVGVSVRPKVPLRTMSYKLAIDMSHFIKEKGGLEGIYYSARRHRILDIYLEKEEGIIPDWQDYTSGPGIRYPKTFGWLWKLVP

SEQ ID NO: 715 - protein, 1009 aa, Artificial Sequence
  SIV pol hybrid
MFFRAWPMGKEASQFPHGPDASGADTNCSPRGSSCGSTEELHEVGQKAERKAEGEQRETLQGGNGGFAAPQFSLWRRPVVTAHIEGQPVEVLLADDSIVTGIELGPHYTPKIVGGIGGFINTKEYKNVEIEVLGKRIKGTIMTGDTPINIFGRNLLTALGMSLNFPIAKVEPVKVALKPGKDGPKLKQWPLSKEKIVALREICEKMEKDGQLEEAPPTNPYNTPTFAIKKKDKNKWRMLIDFRELNRVTQDFTEVQLGIPHPAGLAKRKRITVLDIGDAYFSIPLDEEFRQYTAFTLPSVNNAEPGKRYIYKVLPQGWKGSPAIFQYTMRHVLEPFRKANPDVTLVQILIASDRTDLEHDRVVLQSKELLNSIGFSTPEEKFQKDPPFQWMGYELWPTKWKLQKIELPQRETWTVNDIQKLVGVLNWAAQIYPGIKTKNLCKMIRGKMALTEGVQWTELAEAELEENRIILNQEQEGRYYREDKPLEATVLKNQDNQWTYKIHQGDRILKVGKYAKVKNTHTNGIRLLANVVQKIGKESIVIWGQTPFFHLPVEREVWDQWWTDYWQATWIPDWDFVSTPPLIRLVFNLVKEPIEKEEVYYIDGSCNRNSKEGKAGYVTDRGKEKVLVLEQATNQQALQAFLLALKDSGPKANIVTDSQYVLGIITGQPTESDSRIVAQIIEQMIKKSEVYIGWVPAHKGLGGNQEVDRLVSQEIRQVLFLESIEPAQEDHDKYHSNIKELAFKFGLPRLVAKQIVDTCNKCQQKGEAIHGQANSDLGTWQMCTHLEGKIIIVAVHVASGFIEAEVIPQETGRQTALFLLKLAGRWPITHLHTNGANFASQEVKMVAWWAGIEHTFGVPYNPQSQGVVAMNHHLKNQIDRIREQANSVETIVLMAVHCMNFKRRGGIGDMTPAERLINMITTEQEIQFQQSKNSKFKNFRVYYREGRDQLWKGPGELLWKGEGAVILKVGTDIKVVPRRKAKIIKDYGGGKEVDSSSHMEDTGEAREVA

SEQ ID NO: 716 - protein, 604 aa, Artificial Sequence
  SIV pol conserved
MPQFSLWRRPVVTAHIEGQPVEVLLADDSIVTGIELGPHYTPKIVGGIGGFINTKEYKNVEIEVLGKRIKGTIMTGDTPINIFGRNLLTALGMSLNFPIAKVEPVKVALKPGKDGPKLKQWPLSKEKIVALREICEKMEKDGQLEEAPPTNPYNTPTFAIKKKDKNKWRMLIDFRELNRVTQDFTEVQLGIPHPAGLAKRKRITVLDIGDAYFSIPLDEEFRQYTAFTLPSVNNAEPGKRYIYKVLPQGWKGSPAIFQYTMRHVLEPFRKANPDVTLVQILIASDRTDLEHDRVVLQSKELLNSIGFSTPEEKFQKDPPFQWMGYELWPTKWKLQKIELPQRETWTVNDIQKLVGVLNWAAQIYHGQANSDLGTWQMCTHLEGKIIIVAVHVASGFIEAEVIPQETGRQTALFLLKLAGRWPITHLHTNGANFASQEVKMVAWWAGIEHTFGVPYNPQSQGVVAMNHHLKNQIDRIREQANSVETIVLMAVHCMNFKRRGGIGDMTPAERLINMITTEQEIQFQQSKNSKFKNFRVYYREGRDQLWKGPGELLWKGEGAVILKVGTDIKVVPRRKAKIIKDYGGGKEVDSSSHMEDTGEAREVA

SEQ ID NO: 717 - protein, 1003 aa, Artificial Sequence
  HIV B pol epigraph1
FFRENLAFPQGKAREFSSEQTRANSPTRRELQVWGRDNNSLSEAGADRQGTVSFSFPQITLWQRPLVTIKIGGQLKEALLDTGADDTVLEEMNLPGRWKPKMIGGIGGFIKVRQYDQIPIEICGHKAIGTVLVGPTPVNIIGRNLLTQIGCTLNFPISPIETVPVKLKPGMDGPKVKQWPLTEEKIKALVEICTEMEKEGKISKIGPENPYNTPVFAIKKKDSTKWRKLVDFRELNKRTQDFWEVQLGIPHPAGLKKKKSVTVLDVGDAYFSVPLDKDFRKYTAFTIPSINNETPGIRYQYNVLPQGWKGSPAIFQSSMTKILEPFRKQNPDIVIYQYMDDLYVGSDLEIGQHRTKIEELRQHLLRWGFTTPDKKHQKEPPFLWMGYELHPDKWTVQPIVLPEKDSWTVNDIQKLVGKLNWASQIYAGIKVKQLCKLLRGTKALTEVVPLTEEAELELAENREILKEPVHGVYYDPSKDLIAEIQKQGQGQWTYQIYQEPFKNLKTGKYARMRGAHTNDVKQLTEAVQKIATESIVIWGKTPKFKLPIQKETWEAWWTEYWQATWIPEWEFVNTPPLVKLWYQLEKEPIVGAETFYVDGAANRETKLGKAGYVTDRGRQKVVSLTDTTNQKTELQAIHLALQDSGLEVNIVTDSQYALGIIQAQPDKSESELVSQIIEQLIKKEKVYLAWVPAHKGIGGNEQVDKLVSAGIRKVLFLDGIDKAQEEHEKYHSNWRAMASDFNLPPVVAKEIVASCDKCQLKGEAMHGQVDCSPGIWQLDCTHLEGKIILVAVHVASGYIEAEVIPAETGQETAYFLLKLAGRWPVKTIHTDNGSNFTSTTVKAACWWAGIKQEFGIPYNPQSQGVVESMNKELKKIIGQVRDQAEHLKTAVQMAVFIHNFKRKGGIGGYSAGERIVDIIATDIQTKELQKQITKIQNFRVYYRDSRDPLWKGPAKLLWKGEGAVVIQDNSDIKVVPRRKAKIIRDYGKQMAGDDCVASRQDED

SEQ ID NO: 718 - protein, 499 aa, Artificial Sequence
  HIV M gag Epigraph1
MGARASVLSGGKLDAWEKIRLRPGGKKKYRLKHLVWASRELERFALNPGLLETSEGCRQILGQLQPSLQTGSEELKSLYNTVATLYCVHQRIEVKDTKEALDKIEEEQNKSKKKAQQAAADTGNSSQVSQNYPIVQNLQGQMVHQAISPRTLNAWVKVVEEKAFSPEVIPMFSALSEGATPQDLNTMLNTVGGHQAAMQMLKETINEEAAEWDRLHPVHAGPIAPGQMREPRGSDIAGTTSTLQEQIGWMTNNPPIPVGEIYKRWIILGLNKIVRMYSPVSILDIRQGPKEPFRDYVDRFYKTLRAEQATQEVKNWMTETLLVQNANPDCKTILKALGPAATLEEMMTACQGVGGPGHKARVLAEAMSQVTNSATIMMQRGNFKGQKRIKCFNCGKEGHIARNCRAPRKKGCWKCGKEGHQMKDCTERQANFLGKIWPSHKGRPGNFLQSRPEPTAPPEESFRFGEETTTPSQKQEPIDKELYPLASLKSLFGNDPLSQ

SEQ ID NO: 719 - protein, 231 aa, Artificial Sequence
  HIV M gag Epigraph1 Conserved
PIVQNLQGQMVHQAISPRTLNAWVKVVEEKAFSPEVIPMFSALSEGATPQDLNTMLNTVGGHQAAMQMLKETINEEAAEWDRLHPVHAGPIAPGQMREPRGSDIAGTTSTLQEQIGWMTNNPPIPVGEIYKRWIILGLNKIVRMYSPVSILDIRQGPKEPFRDYVDRFYKTLRAEQATQEVKNWMTETLLVQNANPDCKTILKALGPAATLEEMMTACQGVGGPGHKARVL

SEQ ID NO: 720 - protein, 496 aa, Artificial Sequence
  HIV M gag Epigraph2
MGARASVLSGGELDRWEKIRLRPGGKKKYKLKHIVWASRELERFAVNPGLLETAEGCQQIIEQLQSTLKTGSEELKSLFNTVAVLYCVHQRIDVKDTKEALEKIEEEQNKSQQKTQQAAAGTGSSSKVSQNYPIVQNAQGQMVHQPLSPRTLNAWVKVIEEKAFSPEVIPMFTALSEGATPQDLNMMLNIVGGHQAAMQMLKDTINEEAAEWDRVHPVHAGPIPPGQMREPRGSDIAGTTSNLQEQIGWMTSNPPIPVGDIYKRWIILGLNKIVRMYSPTSILDIKQGPKEPFRDYVDRFFKTLRAEQASQEVKNWMTDTLLVQNANPDCKTILRALGPGATLEEMMTACQGVGGPSHKARVLAEAMSQVTNSATIMMQRGNFRNQRKTVKCFNCGKEGHLARNCRAPRKKGCWKCGREGHQMKDCNERQANFLGKIWPSNKGRPGNFPQSRPEPTAPPAESFRFEETTPAPKQEPKDREPLTSLKSLFGSDPLSQ

SEQ ID NO: 721 - protein, 231 aa, Artificial Sequence
  HIV M gag Epigraph2 Conserved
PIVQNAQGQMVHQPLSPRTLNAWVKVIEEKAFSPEVIPMFTALSEGATPQDLNMMLNIVGGHQAAMQMLKDTINEEAAEWDRVHPVHAGPIPPGQMREPRGSDIAGTTSNLQEQIGWMTSNPPIPVGDIYKRWIILGLNKIVRMYSPTSILDIKQGPKEPFRDYVDRFFKTLRAEQASQEVKNWMTDTLLVQNANPDCKTILRALGPGATLEEMMTACQGVGGPSHKARVL

SEQ ID NO: 722 - protein, 206 aa, Artificial Sequence
  HIV M nef Epigraph1
MGGKWSKSSIVGWPAVRERMRRAEPAAEGVGAVSRDLEKHGAITSSNTAATNADCAWLEAQEEEEVGFPVRPQVPLRPMTYKGALDLSHFLKEKGGLEGLIYSKKRQEILDLWVYHTQGYFPDWQNYTPGPGIRYPLTFGWCFKLVPVDPREVEEANEGENNCLLHPMSQHGMDDPEKEVLMWKFDSRLAFHHMARELHPEYYKDC

SEQ ID NO: 723 - protein, 82 aa, Artificial Sequence
  HIV M nef Epigraph1 Conserved
VGFPVRPQVPLRPMTYKGALDLSHFLKEKGGLEGLIYSKKRQEILDLWVYHTQGYFPDWQNYTPGPGIRYPLTFGWCFKLVP

SEQ ID NO: 724 - protein, 206 aa, Artificial Sequence
  HIV M nef Epigraph2
MGSKWSKSSIVGWPAIRERMRRTEPAAEGVGAASRDLERHGAITSSNTAANNADCAWLEAQEDEEVGFPVKPQVPLRPMTYKAAFDLSFFLKEKGGLDGLIYSQKRQDILDLWVYNTQGFFPDWQNYTPGPGVRYPLTFGWCFKLVPVEPEKVEEANEGENNSLLHPMSLHGMDDPEREVLMWKFDSSLARRHMARELHPEFYKDC

SEQ ID NO: 725 - protein, 82 aa, Artificial Sequence
  HIV M nef Epigraph2 Conserved
VGFPVKPQVPLRPMTYKAAFDLSFFLKEKGGLDGLIYSQKRQDILDLWVYNTQGFFPDWQNYTPGPGVRYPLTFGWCFKLVP

SEQ ID NO: 726 - protein, 1004 aa, Artificial Sequence
  HIV M pol Epigraph1
FFRENLAFPQGEAREFSSEQTRANSPTRRELQVWGRDNNSLSEAGADRQGTVSFSFPQITLWQRPLVTIKIGGQLKEALLDTGADDTVLEDINLPGKWKPKMIGGIGGFIKVRQYDQILIEICGKKAIGTVLVGPTPVNIIGRNLLTQIGCTLNFPISPIETVPVKLKPGMDGPKVKQWPLTEEKIKALVEICTEMEKEGKISKIGPENPYNTPVFAIKKKDSTKWRKLVDFRELNKRTQDFWEVQLGIPHPAGLKKKKSVTVLDVGDAYFSVPLDKDFRKYTAFTIPSINNETPGIRYQYNVLPQGWKGSPAIFQSSMTKILEPFRKQNPDIVIYQYMDDLYVGSDLEIGQHRTKIEELRQHLLKWGFTTPDKKHQKEPPFLWMGYELHPDKWTVQPIVLPEKDSWTVNDIQKLVGKLNWASQIYPGIKVKQLCKLLRGAKALTDIVPLTEEAELELAENREILKEPVHGVYYDPSKDLIAEIQKQGQDQWTYQIYQEPFKNLKTGKYARMRGAHTNDVKQLTEAVQKIATESIVIWGKTPKFRLPIQKETWETWWTEYWQATWIPEWEFVNTPPLVKLWYQLEKEPIVGAETFYVDGAANRETKLGKAGYVTDRGRQKVVSLTETTNQKTELQAIHLALQDSGSEVNIVTDSQYALGIIQAQPDKSESELVNQIIEQLIKKEKVYLSWVPAHKGIGGNEQVDKLVSSGIRKVLFLDGIDKAQEEHEKYHSNWRAMASDFNLPPIVAKEIVASCDKCQLKGEAMHGQVDCSPGIWQLDCTHLEGKVILVAVHVASGYIEAEVIPAETGQETAYFLLKLAGRWPVKVIHTDNGSNFTSAAVKAACWWAGIKQEFGIPYNPQSQGVVESMNKELKKIIGQVRDQAEHLKTAVQMAVFIHNFKRKGGIGGYSAGERIIDIIATDIQTKELQKQITKIQNFRVYYRDSRDPIWKGPAKLLWKGEGAVVIQDNSDIKVVPRRKAKIIRDYGKQMAGDDCVAGRQDEDQ

SEQ ID NO: 727 - protein, 609 aa, Artificial Sequence
  HIV M pol Epigraph1 Conserved
PQITLWQRPLVTIKIGGQLKEALLDTGADDTVLEDINLPGKWKPKMIGGIGGFIKVRQYDQILIEICGKKAIGTVLVGPTPVNIIGRNLLTQIGCTLNFPISPIETVPVKLKPGMDGPKVKQWPLTEEKIKALVEICTEMEKEGKISKIGPENPYNTPVFAIKKKDSTKWRKLVDFRELNKRTQDFWEVQLGIPHPAGLKKKKSVTVLDVGDAYFSVPLDKDFRKYTAFTIPSINNETPGIRYQYNVLPQGWKGSPAIFQSSMTKILEPFRKQNPDIVIYQYMDDLYVGSDLEIGQHRTKIEELRQHLLKWGFTTPDKKHQKEPPFLWMGYELHPDKWTVQPIVLPEKDSWTVNDIQKLVGKLNWASQIYHGQVDCSPGIWQLDCTHLEGKVILVAVHVASGYIEAEVIPAETGQETAYFLLKLAGRWPVKVIHTDNGSNFTSAAVKAACWWAGIKQEFGIPYNPQSQGVVESMNKELKKIIGQVRDQAEHLKTAVQMAVFIHNFKRKGGIGGYSAGERIIDIIATDIQTKELQKQITKIQNFRVYYRDSRDPIWKGPAKLLWKGEGAVVIQDNSDIKVVPRRKAKIIRDYGKQMAGDDCVAGRQDEDQ

SEQ ID NO: 728 - protein, 1003 aa, Artificial Sequence
  HIV M pol Epigraph2
FFREDLAFPQGKAREFPSEQTRANSPTRGELQVWGGDNNSPSEAGADRQGTVSFSFPQITLWQRPLVSIKVGGQIKEALLDTGADDTVLEEMNLPGRWKPKMIGGIGGFIKVRQYDQIPIEICGHKAIGTVLIGPTPVNIIGRNMLTQLGCTLNFPISPIDTVPVTLKPGMDGPRVKQWPLTEEKIKALTEICKEMEKEGKITKIGPENPYNTPIFAIKKKDSTKWRKLVDFRELNKKTQDFWEVQLGIPHPAGLKKKKSVTVLDVGDAYFSVPLDESFRKYTAFTIPSTNNETPGIRYQYNVLPQGWKGSPAIFQCSMTKILEPFRIKNPEIVIYQYMDDLYVGSDLEIGQHRAKIEELREHLLRWGFTTPDKKHQKEPPFLWMGYELHPDRWTVQPIELPEKDSWTVNDIQKLVGKLNWASQIYAGIKVRQLCKLLRGTKALTEVVPLTEEAELELAENREILKTPVHGVYYDPSKDLVAEIQKQGQGQWTYQIYQEPYKNLKTGKYARKRSAHTNDVRQLTEVVQKIATESIVIWGKTPKFKLPIQKETWEAWWTDYWQATWIPDWEFVNTPPLVKLWYQLEKDPIVGAETFYVDGAASRETKLGKAGYVTNRGRQKVVSLTDTTNQKTELHAIHLALQDSGLEVNIVTDSQYALGIIQAQPDRSESEVVNQIIEELIKKEKVYLAWVPAHKGIGGNEQVDKLVSAGIRKVLFLDGIDKAQEEHERYHSNWRTMASDFNLPPVVAKEIVANCDKCQLKGEAIHGQVDCSPGMWQLDCTHLEGKIILVAVHVASGYMEAEVIPAETGQETAYFILKLAGRWPVKTIHTDNGSNFTSTTVKAACWWAGIQQEFGIPYNPQSQGVVESMNNELKKIIGQVREQAEHLKTAVQMAVFIHNFKRRGGIGGYSAGERIVDIIATDIQTRELQKQIIKIQNFRVYYRDSRDPLWKGPAKLLWKGEGAVVIQDNSEIKVVPRRKVKIIKDYGKQMAGDDCVASRQDED

SEQ ID NO: 729 - protein, 608 aa, Artificial Sequence
  HIV M pol Epigraph2 Conserved
PQITLWQRPLVSIKVGGQIKEALLDTGADDTVLEEMNLPGRWKPKMIGGIGGFIKVRQYDQIPIEICGHKAIGTVLIGPTPVNIIGRNMLTQLGCTLNFPISPIDTVPVTLKPGMDGPRVKQWPLTEEKIKALTEICKEMEKEGKITKIGPENPYNTPIFAIKKKDSTKWRKLVDFRELNKKTQDFWEVQLGIPHPAGLKKKKSVTVLDVGDAYFSVPLDESFRKYTAFTIPSTNNETPGIRYQYNVLPQGWKGSPAIFQCSMTKILEPFRIKNPEIVIYQYMDDLYVGSDLEIGQHRAKIEELREHLLRWGFTTPDKKHQKEPPFLWMGYELHPDRWTVQPIELPEKDSWTVNDIQKLVGKLNWASQIYHGQVDCSPGMWQLDCTHLEGKIILVAVHVASGYMEAEVIPAETGQETAYFILKLAGRWPVKTIHTDNGSNFTSTTVKAACWWAGIQQEFGIPYNPQSQGVVESMNNELKKIIGQVREQAEHLKTAVQMAVFIHNFKRRGGIGGYSAGERIVDIIATDIQTRELQKQIIKIQNFRVYYRDSRDPLWKGPAKLLWKGEGAVVIQDNSEIKVVPRRKVKIIKDYGKQMAGDDCVASRQDED

SEQ ID NO: 730 - protein, 500 aa, Artificial Sequence
  HIV B gag Epigraph1
MGARASVLSGGELDRWEKIRLRPGGKKKYRLKHIVWASRELERFAVNPGLLETSEGCRQILGQLQPSLQTGSEELKSLYNTVATLYCVHQRIEVKDTKEALDKIEEEQNKSKKKAQQAAADTGNSSQVSQNYPIVQNLQGQMVHQAISPRTLNAWVKVVEEKAFSPEVIPMFSALSEGATPQDLNTMLNTVGGHQAAMQMLKETINEEAAEWDRLHPVHAGPIAPGQMREPRGSDIAGTTSTLQEQIGWMTNNPPIPVGEIYKRWIILGLNKIVRMYSPTSILDIRQGPKEPFRDYVDRFYKTLRAEQASQEVKNWMTETLLVQNANPDCKTILKALGPAATLEEMMTACQGVGGPGHKARVLAEAMSQVTNSATIMMQRGNFRNQRKTVKCFNCGKEGHIAKNCRAPRKKGCWKCGKEGHQMKDCTERQANFLGKIWPSHKGRPGNFLQSRPEPTAPPEESFRFGEETTTPSQKQEPIDKELYPLASLKSLFGNDPSSQ

SEQ ID NO: 731 - protein, 231 aa, Artificial Sequence
  HIV B gag Epigraph1 Conserved
PIVQNLQGQMVHQAISPRTLNAWVKVVEEKAFSPEVIPMFSALSEGATPQDLNTMLNTVGGHQAAMQMLKETINEEAAEWDRLHPVHAGPIAPGQMREPRGSDIAGTTSTLQEQIGWMTNNPPIPVGEIYKRWIILGLNKIVRMYSPTSILDIRQGPKEPFRDYVDRFYKTLRAEQASQEVKNWMTETLLVQNANPDCKTILKALGPAATLEEMMTACQGVGGPGHKARVL

SEQ ID NO: 732 - protein, 499 aa, Artificial Sequence
  HIV B gag Epigraph2
MGARASVLSGGKLDKWEKIRLRPGGKKKYKLKHIVWASRELERFALNPGLLETSEGCKQILGQLQPALQTGSEELRSLYNTVAVLYCVHQRIDVKDTKEALEKIEEEQNKSKKRAQQAAADTGNNSQVSQNYPIVQNMQGQMVHQPISPRTLNAWVKVIEEKAFSPEVIPMFTALSEGATPQDLNTMLNTVGGHQAAMQILKETINEEAADWDRLHPVHAGPVAPGQMREPRGSDIAGTTSNLQEQIGWMTSNPPIPVGEIYKRWIIMGLNKIVRMYSPVSILDIKQGPKEPFRDYVDRFYKVLRAEQASQDVKNWMTETLLVQNSNPDCKTILKALGPGATLEEMMTACQGVGGPSHKARILAEAMSQVTNSATIMMQKGNFRNQRKIVKCFNCGKEGHIARNCRAPRKKGCWKCGREGHQMKDCNERQANFLGKIWPSYKGRPGNFLQNRPEPTAPPAESFRFGEETTTPPQKQEPIDKDLYPLASLRSLFGNDPSS

SEQ ID NO: 733 - protein, 231 aa, Artificial Sequence
  HIV B gag Epigraph2 Conserved
PIVQNMQGQMVHQPISPRTLNAWVKVIEEKAFSPEVIPMFTALSEGATPQDLNTMLNTVGGHQAAMQILKETINEEAADWDRLHPVHAGPVAPGQMREPRGSDIAGTTSNLQEQIGWMTSNPPIPVGEIYKRWIIMGLNKIVRMYSPVSILDIKQGPKEPFRDYVDRFYKVLRAEQASQDVKNWMTETLLVQNSNPDCKTILKALGPGATLEEMMTACQGVGGPSHKARIL

SEQ ID NO: 734 - protein, 206 aa, Artificial Sequence
  HIV B nef Epigraph1
MGGKWSKSSIVGWPAVRERMRRAEPAAEGVGAVSRDLEKHGAITSSNTAATNADCAWLEAQEEEEVGFPVRPQVPLRPMTYKGALDLSHFLKEKGGLEGLIYSQKRQDILDLWVYHTQGYFPDWQNYTPGPGIRYPLTFGWCFKLVPVEPEKVEEANEGENNSLLHPMSQHGMDDPEKEVLMWKFDSRLAFHHMARELHPEYYKDC

SEQ ID NO: 735 - protein, 81 aa, Artificial Sequence
  HIV B nef Epigraph1 Conserved
GFPVRPQVPLRPMTYKGALDLSHFLKEKGGLEGLIYSQKRQDILDLWVYHTQGYFPDWQNYTPGPGIRYPLTFGWCFKLVP

SEQ ID NO: 736 - protein, 206 aa, Artificial Sequence
  HIV B nef Epigraph2
MGGKWSKSSVVGWPAIRERMRRAEPAADGVGAASRDLERHGAITSSNTAANNAACAWLEAQEDEEVGFPVKPQVPLRPMTYKAAVDLSHFLKEKGGLEGLIHSQKRQEILDLWVYHTQGFFPDWQNYTPGPGTRFPLTFGWCFKLVPVDPDKVEEANEGENNCLLHPMSLHGMDDPEREVLVWKFDSRLAFHHVARELHPEYYKNC

SEQ ID NO: 737 - protein, 81 aa, Artificial Sequence
  HIV B nef Epigraph2 Conserved
GFPVKPQVPLRPMTYKAAVDLSHFLKEKGGLEGLIHSQKRQEILDLWVYHTQGFFPDWQNYTPGPGTRFPLTFGWCFKLVP

SEQ ID NO: 738 - protein, 1003 aa, Artificial Sequence; identical to SEQ ID NO: 717
  HIV B pol Epigraph1

SEQ ID NO: 739 - protein, 608 aa, Artificial Sequence
  HIV B pol Epigraph1 Conserved
PQITLWQRPLVTIKIGGQLKEALLDTGADDTVLEEMNLPGRWKPKMIGGIGGFIKVRQYDQIPIEICGHKAIGTVLVGPTPVNIIGRNLLTQIGCTLNFPISPIETVPVKLKPGMDGPKVKQWPLTEEKIKALVEICTEMEKEGKISKIGPENPYNTPVFAIKKKDSTKWRKLVDFRELNKRTQDFWEVQLGIPHPAGLKKKKSVTVLDVGDAYFSVPLDKDFRKYTAFTIPSINNETPGIRYQYNVLPQGWKGSPAIFQSSMTKILEPFRKQNPDIVIYQYMDDLYVGSDLEIGQHRTKIEELRQHLLRWGFTTPDKKHQKEPPFLWMGYELHPDKWTVQPIVLPEKDSWTVNDIQKLVGKLNWASQIYHGQVDCSPGIWQLDCTHLEGKIILVAVHVASGYIEAEVIPAETGQETAYFLLKLAGRWPVKTIHTDNGSNFTSTTVKAACWWAGIKQEFGIPYNPQSQGVVESMNKELKKIIGQVRDQAEHLKTAVQMAVFIHNFKRKGGIGGYSAGERIVDIIATDIQTKELQKQITKIQNFRVYYRDSRDPLWKGPAKLLWKGEGAVVIQDNSDIKVVPRRKAKIIRDYGKQMAGDDCVASRQDED

SEQ ID NO: 740 - protein, 1003 aa, Artificial Sequence
  HIV B pol Epigraph2
FFREDLAFPQGEAREFPSEQTRANSPTRGELQVWGGDNNSPSEAGADRQGTVSLSFPQITLWQRPLVTIKVGGQLKEALLDTGADDTVLEDMNLPGKWKPKMIGGIGGFIKVRQYDQILIEICGHKAIGTVLIGPTPVNIIGRNLLTQLGCTLNFPISPIDTVPVKLKPGMDGPRVKQWPLTEEKIKALIEICTEMEKEGKISRIGPENPYNTPIFAIKKKDSTKWRKLVDFRELNKKTQDFWEVQLGIPHPSGLKKKKSVTVLDVGDAYFSVPLDKEFRKYTAFTIPSTNNETPGIRYQYNVLPQGWKGSPAIFQCSMTKILEPFRKQNPEIVIYQYMDDLYVGSDLEIEQHRTKIEELRQHLLKWGFTTPDKKHQKEPPFLWMGYELHPDKWTVQPIMLPEKDSWTVNDIQKLVGKLNWASQIYPGIKVRQLCKLLRGAKALTEVIPLTEEAELELAENREILREPVHGVYYDPTKDLIAEIQKQGLGQWTYQIYQEPYKNLKTGKYARTRGAHTNDVRQLTEAVQKITTESIVIWGKTPKFRLPIQKETWETWWTEYWQATWIPEWEFVNTPPLVKLWYQLEKEPIIGAETFYVDGAANRDTKLGKAGYVTNKGRQKVVTLTDTTNQKTELQAIYLALQDSGSEVNIVTDSQYALGIIQAQPDKSESELVNQIIEQLIKKEKIYLAWVPAHKGIGGNEQVDKLVSSGIRKVLFLDGIDKAQEDHEKYHSNWKAMASDFNLPPIVAKEIVASCDKCQLKGEAIHGQVDCSPGIWQLDCTHLEGKVILVAVHVASGYIEAEVIPAETGQETAYFILKLAGRWPVKTVHTDNGSNFTSATVKAACWWAGVKQEFGIPYNPQSQGVVESMNNELKKIIGQIRDQAEHLKTAVQMAVFIHNFKRKGGIGGYSAGERIIDIIATDIQTRELQKQITKIQNFRVYYRDNRDPLWKGPAKLLWKGEGAVVIQDNSEIKVVPRRKVKIIRDYGKQMAGDDCVAGRQDED

SEQ ID NO: 741 - protein, 608 aa, Artificial Sequence
  HIV B pol Epigraph2 Conserved
PQITLWQRPLVTIKVGGQLKEALLDTGADDTVLEDMNLPGKWKPKMIGGIGGFIKVRQYDQILIEICGHKAIGTVLIGPTPVNIIGRNLLTQLGCTLNFPISPIDTVPVKLKPGMDGPRVKQWPLTEEKIKALIEICTEMEKEGKISRIGPENPYNTPIFAIKKKDSTKWRKLVDFRELNKKTQDFWEVQLGIPHPSGLKKKKSVTVLDVGDAYFSVPLDKEFRKYTAFTIPSTNNETPGIRYQYNVLPQGWKGSPAIFQCSMTKILEPFRKQNPEIVIYQYMDDLYVGSDLEIEQHRTKIEELRQHLLKWGFTTPDKKHQKEPPFLWMGYELHPDKWTVQPIMLPEKDSWTVNDIQKLVGKLNWASQIYHGQVDCSPGIWQLDCTHLEGKVILVAVHVASGYIEAEVIPAETGQETAYFILKLAGRWPVKTVHTDNGSNFTSATVKAACWWAGVKQEFGIPYNPQSQGVVESMNNELKKIIGQIRDQAEHLKTAVQMAVFIHNFKRKGGIGGYSAGERIIDIIATDIQTRELQKQITKIQNFRVYYRDNRDPLWKGPAKLLWKGEGAVVIQDNSEIKVVPRRKVKIIRDYGKQMAGDDCVAGRQDED

SEQ ID NO: 742 - protein, 498 aa, Artificial Sequence
  HIV C gag Epigraph1
MGARASILRGGKLDKWEKIRLRPGGKKHYMLKHLVWASRELERFALNPGLLETSEGCKQIMKQLQPALQTGTEELRSLYNTVATLYCVHEKIEVRDTKEALDKIEEEQNKSQQKTQQAKAADGKVSQNYPIVQNLQGQMVHQAISPRTLNAWVKVIEEKAFSPEVIPMFTALSEGATPQDLNTMLNTVGGHQAAMQMLKDTINEEAAEWDRLHPVHAGPIAPGQMREPRGSDIAGTTSTLQEQIAWMTSNPPIPVGDIYKRWIILGLNKIVRMYSPVSILDIKQGPKEPFRDYVDRFFKTLRAEQATQDVKNWMTDTLLVQNANPDCKTILRALGPGATLEEMMTACQGVGGPGHKARVLAEAMSQANSNIMMQRSNFKGPKRIVKCFNCGKEGHIARNCRAPRKKGCWKCGKEGHQMKDCTERQANFLGKIWPSHKGRPGNFLQSRPEPTAPPAEPTAPPAESFRFEETTPAPKQEPKDREPLTSLKSLFGSDPLSQ

SEQ ID NO: 743 - protein, 231 aa, Artificial Sequence
  HIV C gag Epigraph1 Conserved
PIVQNLQGQMVHQAISPRTLNAWVKVIEEKAFSPEVIPMFTALSEGATPQDLNTMLNTVGGHQAAMQMLKDTINEEAAEWDRLHPVHAGPIAPGQMREPRGSDIAGTTSTLQEQIAWMTSNPPIPVGDIYKRWIILGLNKIVRMYSPVSILDIKQGPKEPFRDYVDRFFKTLRAEQATQDVKNWMTDTLLVQNANPDCKTILRALGPGATLEEMMTACQGVGGPGHKARVL

SEQ ID NO: 744 - protein, 500 aa, Artificial Sequence
  HIV C gag Epigraph2
MGARASVLRGEKLDKWERIRLRPGGKKRYMLKHIVWASRELEKFALNPGLLETAEGCKQIIKQLHPALQTGTEELKSLFNTVATLYCVHKKIDVRDTKEALDKIEEEQNKCQQKTQQAEAADKGKVSQNYPIVQNLQGQMVHQALSPRTLNAWVKVVEEKAFSPEIIPMFTALSEGATPTDLNTMLNTVGGHQAAMQMLKDTINEEAAEWDRVHPVHAGPVAPGQMREPRGSDIAGTTSNLQEQIAWMTNNPPIPVGEIYKRWIILGLNKIVRMYSPVSILDIRQGPKEPFRDYVDRFFKVLRAEQATQEVKNWMTETLLVQNANPDCKTILRALGPGASLEEMMTACQGVGGPSHKARVLAEAMSQANNANIMMQRSNFKGSKRIVKCFNCGKEGHIAKNCRAPRKKGCWKCGREGHQMKDCNERQANFLGKIWPSNKGRPGNFLQNRPEPTAPPAEPTAPPAESFKFEETTPAPKQESKDREPLISLKSLFGNDPLSQ

SEQ ID NO: 745 - protein, 231 aa, Artificial Sequence
  HIV C gag Epigraph2 Conserved
PIVQNLQGQMVHQALSPRTLNAWVKVVEEKAFSPEIIPMFTALSEGATPTDLNTMLNTVGGHQAAMQMLKDTINEEAAEWDRVHPVHAGPVAPGQMREPRGSDIAGTTSNLQEQIAWMTNNPPIPVGEIYKRWIILGLNKIVRMYSPVSILDIRQGPKEPFRDYVDRFFKVLRAEQATQEVKNWMTETLLVQNANPDCKTILRALGPGASLEEMMTACQGVGGPSHKARVL

SEQ ID NO: 746 - protein, 207 aa, Artificial Sequence
  HIV C nef Epigraph1
MGGKWSKSSIVGWPAVRERIRRTEPAAEGVGAASQDLDKYGALTSSNTAHNNADCAWLQAQEEEEEVGFPVRPQVPLRPMTYKAAFDLSFFLKEKGGLEGLIYSKKRQEILDLWVYHTQGFFPDWQNYTPGPGVRYPLTFGWCFKLVPVDPREVEEANEGENNCLLHPMSQHGMEDEDREVLKWQFDSSLARRHMARELHPEYYKDC

SEQ ID NO: 747 - protein, 80 aa, Artificial Sequence
  HIV C nef Epigraph1 Conserved
GFPVRPQVPLRPMTYKAAFDLSFFLKEKGGLEGLIYSKKRQEILDLWVYHTQGFFPDWQNYTPGPGVRYPLTFGWCFKLV

SEQ ID NO: 748 - protein, 207 aa, Artificial Sequence
  HIV C nef Epigraph2
MGSKWSKSSIVGWPAVRERMRRAEPAAEGVGAASRDLDKHGALTSSNTPANNADCAWLEAQEEEGEVGFPVKPQVPLRPMTYKGAFDLGFFLKEKGGLDGLIYSKKRQDILDLWVYNTQGYFPDWQNYTPGPGIRYPLTFGWCYKLVPVDPSEVEEANKGENNCLLHPMSLHGMEDEHREVLKWKFDSSLARRHLAREKHPEFYKDC

SEQ ID NO: 749 - protein, 80 aa, Artificial Sequence
  HIV C nef Epigraph2 Conserved
GFPVKPQVPLRPMTYKGAFDLGFFLKEKGGLDGLIYSKKRQDILDLWVYNTQGYFPDWQNYTPGPGIRYPLTFGWCYKLV

SEQ ID NO: 750 - protein, 1007 aa, Artificial Sequence
  HIV C pol Epigraph1
FFRENLAFPQGEAREFPSEQTRANSPTSRANSPTSRELQVRGDNPRSEAGAERQGTLNFPQITLWQRPLVSIKVGGQIKEALLDTGADDTVLEEINLPGKWKPKMIGGIGGFIKVRQYDQILIEICGKKAIGTVLVGPTPVNIIGRNMLTQLGCTLNFPISPIETVPVKLKPGMDGPKVKQWPLTEEKIKALTAICEEMEKEGKITKIGPENPYNTPVFAIKKKDSTKWRKLVDFRELNKRTQDFWEVQLGIPHPAGLKKKKSVTVLDVGDAYFSVPLDEGFRKYTAFTIPSINNETPGIRYQYNVLPQGWKGSPAIFQSSMTKILEPFRAQNPEIVIYQYMDDLYVGSDLEIGQHRAKIEELREHLLKWGFTTPDKKHQKEPPFLWMGYELHPDKWTVQPIQLPEKDSWTVNDIQKLVGKLNWASQIYPGIKVRQLCKLLRGAKALTDIVPLTEEAELELAENREILKEPVHGVYYDPSKDLIAEIQKQGHDQWTYQIYQEPFKNLKTGKYAKMRTAHTNDVKQLTEAVQKIAMESIVIWGKTPKFRLPIQKETWETWWTDYWQATWIPEWEFVNTPPLVKLWYQLEKEPIAGAETFYVDGAANRETKIGKAGYVTDRGRQKIVSLTETTNQKTELQAIQLALQDSGSEVNIVTDSQYALGIIQAQPDKSESELVNQIIEQLIKKERVYLSWVPAHKGIGGNEQVDKLVSSGIRKVLFLDGIDKAQEEHEKYHSNWRAMASEFNLPPIVAKEIVASCDKCQLKGEAIHGQVDCSPGIWQLDCTHLEGKIILVAVHVASGYIEAEVIPAETGQETAYYILKLAGRWPVKVIHTDNGSNFTSAAVKAACWWAGIQQEFGIPYNPQSQGVVESMNKELKKIIGQVRDQAEHLKTAVQMAVFIHNFKRKGGIGGYSAGERIIDIIATDIQTKELQKQIIKIQNFRVYYRDSRDPIWKGPAKLLWKGEGAVVIQDNSDIKVVPRRKVKIIKDYGKQMAGADCVAGRQDEDQ

SEQ ID NO: 751 - protein, 609 aa, Artificial Sequence
  HIV C pol Epigraph1 Conserved
PQITLWQRPLVSIKVGGQIKEALLDTGADDTVLEEINLPGKWKPKMIGGIGGFIKVRQYDQILIEICGKKAIGTVLVGPTPVNIIGRNMLTQLGCTLNFPISPIETVPVKLKPGMDGPKVKQWPLTEEKIKALTAICEEMEKEGKITKIGPENPYNTPVFAIKKKDSTKWRKLVDFRELNKRTQDFWEVQLGIPHPAGLKKKKSVTVLDVGDAYFSVPLDEGFRKYTAFTIPSINNETPGIRYQYNVLPQGWKGSPAIFQSSMTKILEPFRAQNPEIVIYQYMDDLYVGSDLEIGQHRAKIEELREHLLKWGFTTPDKKHQKEPPFLWMGYELHPDKWTVQPIQLPEKDSWTVNDIQKLVGKLNWASQIYHGQVDCSPGIWQLDCTHLEGKIILVAVHVASGYIEAEVIPAETGQETAYYILKLAGRWPVKVIHTDNGSNFTSAAVKAACWWAGIQQEFGIPYNPQSQGVVESMNKELKKIIGQVRDQAEHLKTAVQMAVFIHNFKRKGGIGGYSAGERIIDIIATDIQTKELQKQIIKIQNFRVYYRDSRDPIWKGPAKLLWKGEGAVVIQDNSDIKVVPRRKVKIIKDYGKQMAGADCVAGRQDEDQ

SEQ ID NO: 752 - protein, 1006 aa, Artificial Sequence
  HIV C pol Epigraph2
FFRENLAFQQGEAREFPSEQARANSPTSRANSPTSRELQVRGDNPCSEAGAERQGTFNFPQITLWQRPLVTIKVGGQIKEALLDTGADDTVLEDINLPGKWKPRMIGGIGGFIKVRQYDQIPIEICGKKAIGSVLVGPTPVNIIGRNLLTQLGCTLNFPISPIETIPVKLKPGMDGPRVKQWPLTEEKIKALTEICEEMEKEGKISKIGPENPYNTPIFAIKKKDSTKWRKLVDFRELNKRTQDFWEVQLGIPHPAGLKKKKSVTVLDVGDAYFSVPLDESFRKYTAFTIPSTNNETPGIRYQYNVLPQGWKGSPAIFQSSMTRILEPFRAKNPEIVIYQYMDDLYVGSDLEIEQHRAKIEELREHLLRWGFTTPDKKHQKEPPFLWMGYELHPDKWTVQPIQLPEKESWTVNDIQKLVGKLNWASQIYPGIKVKQLCKLLRGTKALTDIVPLTEEAELELAENREILREPVHGVYYDPSKELIAEIQKQGQDQWTYQIYQEPFKNLKTGKYAKRRTAHTNDVRQLTEAVQKIALESIVIWGKIPKFRLPIQKETWEIWWTDYWQATWIPDWEFVNTPPLVKLWYQLEKEPIAGVETFYVDGAANRETKLGKAGYVTDKGRQKIVTLTETTNQKAELQAIQLALQDSGPEVNIVTDSQYALGIIQAQPDKSESEIVNQIIEQLINKERIYLSWVPAHKGIGGNEQVDKLVSNGIRKVLFLDGIDKAQEEHEKYHNNWRAMASDFNLPPVVAKEIVASCDQCQLKGEAMHGQVDCSPGIWQLDCTHLEGKVILVAVHVASGYMEAEVIPAETGQETAYFILKLAGRWPVKIIHTDNGSNFTSTAVKAACWWAGIKQEFGIPYNPQSQGVVESMNKELKKIIGQVREQAEHLKTAVQMAVFIHNFKRRGGIGGYSAGERIIDIIASDIQTKELQKQITKIQNFRVYYRDSRDPIWKGPAKLLWKGEGAVVLQDNSDIKVVPRRKAKIIRDYGKQMAGDDCVAGRQDED

SEQ ID NO: 753 - protein, 607 aa, Artificial Sequence
  HIV C pol Epigraph2 Conserved
PQITLWQRPLVTIKVGGQIKEALLDTGADDTVLEDINLPGKWKPRMIGGIGGFIKVRQYDQIPIEICGKKAIGSVLVGPTPVNIIGRNLLTQLGCTLNFPISPIETIPVKLKPGMDGPRVKQWPLTEEKIKALTEICEEMEKEGKISKIGPENPYNTPIFAIKKKDSTKWRKLVDFRELNKRTQDFWEVQLGIPHPAGLKKKKSVTVLDVGDAYFSVPLDESFRKYTAFTIPSTNNETPGIRYQYNVLPQGWKGSPAIFQSSMTRILEPFRAKNPEIVIYQYMDDLYVGSDLEIEQHRAKIEELREHLLRWGFTTPDKKHQKEPPFLWMGYELHPDKWTVQPIQLPEKESWTVNDIQKLVGKLNWASQIYHGQVDCSPGIWQLDCTHLEGKVILVAVHVASGYMEAEVIPAETGQETAYFILKLAGRWPVKIIHTDNGSNFTSTAVKAACWWAGIKQEFGIPYNPQSQGVVESMNKELKKIIGQVREQAEHLKTAVQMAVFIHNFKRRGGIGGYSAGERIIDIIASDIQTKELQKQITKIQNFRVYYRDSRDPIWKGPAKLLWKGEGAVVLQDNSDIKVVPRRKAKIIRDYGKQMAGDDCVAGRQDE

SEQ ID NO: 754 - protein, 520 aa, Artificial Sequence
  HIV M Gag episensus EG-0, Tailored
MGARASVLSGGKLDAWEKIRLRPGGKKKYRLKHLVWASRELERFALNPGLLETSEGCRQILGQLQPSLQTGSEELKSLYNTVATLYCVHQRIEVKDTKEALDKIEEEQNKSKKKAQQAAADTGNSSQVSQNYPIVQNLQGQMVHQAISPRTLNAWVKVVEEKAFSPEVIPMFSALSEGATPQDLNTMLNTVGGHQAAMQMLKETINEEAAEWDRLHPVHAGPIAPGQMREPRGSDIAGTTSTLQEQIGWMTNNPPIPVGEIYKRWIILGLNKIVRMYSPVSILDIRQGPKEPFRDYVDRFYKTLRAEQATQEVKNWMTETLLVQNANPDCKTILKALGPAATLEEMMTACQGVGGPGHKARVLAEAMSQVTNSATIMMQRGNFKGQKRIKCFNCGKEGHIARNCRAPRKKGCWKCGKEGHQMKDCTERQANFLGKIWPSHKGRPGNFLQSRPEPTAQSRPEPTAPPAESFRPQPTAPPEESFRFGEETTTPSQKQEPIDKELYPLASLKSLFGNDPLSQY

SEQ ID NO: 755 - protein, 231 aa, Artificial Sequence; identical to SEQ ID NO: 719
  HIV M gag episensus EG-0 Conserved, Tailored

SEQ ID NO: 756 - protein, 532 aa, Artificial Sequence
  HIV M gag CEN-1, Tailored
MGARASVLTGGKLDAWERIRLRPGGKKKYRMKHLVWASRELERFAINPGLLETAEGCQQIIEQLQSTLKTGSEELKSLFNTVATLWCVHQRIEIKDTKEALDKLEEVQNKSQQKTQQAAAGTGSSSKVSQNYPIVQNAQGQMVHQPLSPRTLNAWVKVVEEKGFNPEVIPMFSALSDGATPQDLNMMLNIVGGHQAAMQMLKDTINEEAAEWDRVHPVHAGPIPPGQMREPRESDIAGTTSNLQEQIGWMTSNPPIPVGDIYKRWIILGLHKIVRMYSPVGILDIKQGPKEPFRDYVDRFFKTLRAEQASQEVKNWMTETLLIQNANPDCKSILKALGTGATLEEMMTACQGVGGPSHKARVLAEAMSQAQHANIMMQRGNFKGQRKIKCFNCGKEGHLARNCRAPRKRGCWKCGQEGHQMKDCNERQANFLGKIWPSNKGRPGNFPQSRPEPTAPRTEPTAPPARPEPTAPPLQSRLEPTAPPAEPTAPPAENWGMGEEITSLLKQEQKDKEHPPPLVSLKSLFGNDPLLQ

SEQ ID NO: 757 - protein, 231 aa, Artificial Sequence
  HIV M gag CEN-1 Conserved, Tailored
PIVQNAQGQMVHQPLSPRTLNAWVKVVEEKGFNPEVIPMFSALSDGATPQDLNMMLNIVGGHQAAMQMLKDTINEEAAEWDRVHPVHAGPIPPGQMREPRESDIAGTTSNLQEQIGWMTSNPPIPVGDIYKRWIILGLHKIVRMYSPVGILDIKQGPKEPFRDYVDRFFKTLRAEQASQEVKNWMTETLLIQNANPDCKSILKALGTGATLEEMMTACQGVGGPSHKARVL

SEQ ID NO: 758 - protein, 536 aa, Artificial Sequence
  HIV M gag CEN-2, Tailored
MGARASILRGGKLDKWEKIRLRPGGKKHYMLKHIVWASRELEKFALNPDLLETSEGCKQIIKQLQPALQTGTEELRSLFNTVATLYCVHEKIEVRDTKEALDKVEEEQNKSQQKTQQAKAADGKVSQNYPIVQNAQGQMVHQALSPRTLNAWVKVIEEKAFSPEVIPMFTALSEGATPSDLNTMLNTIGGHQAAMQMLKDTINEEAAEWDRVHPVHAGPVAPGQMREPRGSDIAGSTSTLQEQIAWMTSNPPIPVGDIYKRWIILGLNKIVKMYSPVSILDIKQGPKEPFRDYVDRFFKTLRAEQATQDVKNWMTDTLLVQNANPDCKTILRALGPGATLEEMMTACQGVGGPSHKARVLAEAMSQANSNIMMQRSNFKGPKRIVKCFNCGKEGHIAKNCRAPRKKGCWKCGREGHQMKDCNERQANFLGKIWPSNKGRPGNFLQNRPEPTAPPLQSRLEPTAPLEPTAPPEPTAPPAVVPTAPPVEPTAPPAEPTAPPAESFRFEETTPAPKQEPKDREPLTSLKSLFGSDPLSQ

SEQ ID NO: 759 - protein, 231 aa, Artificial Sequence
  HIV M gag CEN-2 Conserved, Tailored
PIVQNAQGQMVHQALSPRTLNAWVKVIEEKAFSPEVIPMFTALSEGATPSDLNTMLNTIGGHQAAMQMLKDTINEEAAEWDRVHPVHAGPVAPGQMREPRGSDIAGSTSTLQEQIAWMTSNPPIPVGDIYKRWIILGLNKIVKMYSPVSILDIKQGPKEPFRDYVDRFFKTLRAEQATQDVKNWMTDTLLVQNANPDCKTILRALGPGATLEEMMTACQGVGGPSHKARVL

SEQ ID NO: 760 - protein, 520 aa, Artificial Sequence
  HIV M gag CEN-3, Tailored
MGSRASVLSGGELDRWEKIRLRPGGKKKYKLKHIVWASRELERFAVNPGLLETSEGCKQILGQLQPALQTGSEELRSLYNTVAVLYCVHQRIDVKDTKEALEKIEEEQNKCKKKAQQAAAAADTGNNSQVSQNYPIVQNIQGQMVHQALSPRTLNAWVKVIEEKAFSPEVIPMFTALSEGATPSDLNTMLNTIGGHQAAMQMLKDTINEEAADWDRLHPVQAGPVAPGQMRDPRGSDIAGTTSNLQEQIGWMTSNPPIPVGDIYKRWIIMGLNKIVRMYSPTSILDIKQGPKEPFRDYVDRFFKTLRAEQASQEVKNWMTETLLVQNSNPDCKTILKALGPGATLEEMMTACQGVGGPSHKARVLAEAMSQATNSAAIMMQRGNFRNQRKIVKCFNCGKEGHIAKNCRAPRKRGCWKCGREGHQMKDCNERQANFLGRIWPSNKGRPGNFLQNRPEPTAPNFLQSRPEPSAPPEPTAPPEESFRFGEETATPSQKQEPTDKELYPLASLRSLFGNDPSSQ

SEQ ID NO: 761 - protein, 231 aa, Artificial Sequence
  HIV M gag CEN-3 Conserved, Tailored
PIVQNIQGQMVHQALSPRTLNAWVKVIEEKAFSPEVIPMFTALSEGATPSDLNTMLNTIGGHQAAMQMLKDTINEEAADWDRLHPVQAGPVAPGQMRDPRGSDIAGTTSNLQEQIGWMTSNPPIPVGDIYKRWIIMGLNKIVRMYSPTSILDIKQGPKEPFRDYVDRFFKTLRAEQASQEVKNWMTETLLVQNSNPDCKTILKALGPGATLEEMMTACQGVGGPSHKARVL

SEQ ID NO: 762 - protein, 506 aa, Artificial Sequence
  HIV M gag CEN-4, Tailored
MGTRASVLSGGELDRWEKIRLRPGGKKKYKLKHIVWASRELERFAVNPGLLETAEGCRQILEQLQPALQTGSEELRSLYNTVAVLYCVHQRIDVKDTKEALEKIEEEQNKCKKKAQQTAADTGNNSQVSQNYPIVQNMQGQMVHQPISPRTLNAWVKVIEEKAFSPEVIPMFTALSEGATPHDLNTMLNTIGGHQAAMQMLKDTINEEAAEWDRVHPVHAGPVAPGQMREPKGSDIAGTTSNLQEQIGWMTHNPPIPVGDIYKRWIIMGLNKIVRMYSPTSILDIKQGPKEPFRDYVDRFFKTLRAEQASQDVKNWMTETLLVQNSNPDCKTILKALGPGATLEEMMSACQGVGGPSHKARILAEAMSQATNSANIMMQRGNFRNQRKTVKCFNCGKEGHIAKNCRAPRKRGCWKCGREGHQMKDCNERQANFLGKIWPSYKGRPGNFLQNRPEPTAPPEPTAPPEESFGFGEETTTPPQKQEPIDKDLYPLASLRSLFGNDPSSQ

SEQ ID NO: 763 - protein, 231 aa, Artificial Sequence
  HIV M gag CEN-4 Conserved, Tailored
PIVQNMQGQMVHQPISPRTLNAWVKVIEEKAFSPEVIPMFTALSEGATPHDLNTMLNTIGGHQAAMQMLKDTINEEAAEWDRVHPVHAGPVAPGQMREPKGSDIAGTTSNLQEQIGWMTHNPPIPVGDIYKRWIIMGLNKIVRMYSPTSILDIKQGPKEPFRDYVDRFFKTLRAEQASQDVKNWMTETLLVQNSNPDCKTILKALGPGATLEEMMSACQGVGGPSHKARIL

SEQ ID NO: 764 - protein, 514 aa, Artificial Sequence
  HIV M gag CEN-5, Tailored
MGARASILSGGKLDAWERIRLRPGGKKKYRMKHLVWASRELDRFALNPSLLETAEGCQQIMEQLQPALKTGTEELRSLFNTVATLYCVHQRIDVKDTKEALDKIEEIQNKSKQKTQQAAADTGNSSKVSQNYPIVQNAQGQMIHQSLSPRTLNAWVKVIEEKAFSPEVIPMFTALSEGATPQDLNMMLNIVGGHQAAMQMLKDTINEEAAEWDRVHPVHAGPIPPGQMREPRGGDIAGTTSTPQEQIGWMTSNPPIPVGDIYKRWIILGLHKLVRMYSPVSILDIKQGPKEPFRDYVDRFFKTLRAEQATQEVKGWMTETLLIQNANPDCKSILRALGPGATLEEMMTACQGVGGPSHKARVLAEAMSQVQHTNIMMQRGNFRGQKRIKCFNCGKEGHLARNCRAPRKRGCWKCGREGHQMKDCNERQANFLGKIWPSSKGRPGNFPQSRPEPTAPQNRLEPTAPPAEPTAPPAEIFGMGEEITSPPKQEQKDREQAPPLVSLKSLFGNDLLSQ

SEQ ID NO: 765 - protein, 231 aa, Artificial Sequence
  HIV M gag CEN-5 Conserved, Tailored
PIVQNAQGQMIHQSLSPRTLNAWVKVIEEKAFSPEVIPMFTALSEGATPQDLNMMLNIVGGHQAAMQMLKDTINEEAAEWDRVHPVHAGPIPPGQMREPRGGDIAGTTSTPQEQIGWMTSNPPIPVGDIYKRWIILGLHKLVRMYSPVSILDIKQGPKEPFRDYVDRFFKTLRAEQATQEVKGWMTETLLIQNANPDCKSILRALGPGATLEEMMTACQGVGGPSHKARVL

SEQ ID NO: 766 - protein, 498 aa, Artificial Sequence
  HIV C gag episensus EG-0, Tailored
MGARASILRGGKLDKWEKIRLRPGGKKHYMLKHLVWASRELERFALNPGLLETSEGCKQIMKQLQPALQTGTEELRSLYNTVATLYCVHEKIEVRDTKEALDKIEEEQNKSQQKTQQAKAADGKVSQNYPIVQNLQGQMVHQAISPRTLNAWVKVIEEKAFSPEVIPMFTALSEGATPQDLNTMLNTVGGHQAAMQMLKDTINEEAAEWDRLHPVHAGPVAPGQMREPRGSDIAGTTSTLQEQIAWMTSNPPIPVGDIYKRWIILGLNKIVRMYSPVSILDIKQGPKEPFRDYVDRFFKTLRAEQATQDVKNWMTDTLLVQNANPDCKTILRALGPGATLEEMMTACQGVGGPGHKARVLAEAMSQANSNIMMQRSNFKGPKRIVKCFNCGKEGHIARNCRAPRKKGCWKCGKEGHQMKDCTERQANFLGKIWPSHKGRPGNFLQSRPEPTAPPAEPTAPPAESFRFEETTPAPKQEPKDREPLTSLKSLFGSDPLSQ

SEQ ID NO: 767 - protein, 231 aa, Artificial Sequence
  HIV C gag episensus EG-0 Conserved, Tailored
PIVQNLQGQMVHQAISPRTLNAWVKVIEEKAFSPEVIPMFTALSEGATPQDLNTMLNTVGGHQAAMQMLKDTINEEAAEWDRLHPVHAGPVAPGQMREPRGSDIAGTTSTLQEQIAWMTSNPPIPVGDIYKRWIILGLNKIVRMYSPVSILDIKQGPKEPFRDYVDRFFKTLRAEQATQDVKNWMTDTLLVQNANPDCKTILRALGPGATLEEMMTACQGVGGPGHKARVL

SEQ ID NO: 768 - protein, 509 aa, Artificial Sequence
  HIV C gag CEN-1, Tailored
MGARASILRGEKLDKWEKIKLRPGGKKRYMLKHLIWASRELERFALNPSLLETSEGCKQIIKQLQPALKTGTEELRSLFNTVATLYCVHAGIEVRDTKEALDRIEEEQNKCQQKTQQAEAADKGKVSQNYPIVQNAQGQMVHQALSPRTLNAWVKVVEEKAFSPEIIPMFTALSEGATPSDLNSMLNTVGGHQAAMQMLKDTINDEAAEWDRVHPVHAGPIAPGQMREPRGSDIAGTTSNLQEQIAWMTNNPPIPVGEIYKRWIILGLNKIVRMYSPVSILDIRQGPKEPFRDYVDRFFKCLRAEQATQEVKNWMTDTLLIQNANPDCKTILKALGPGASLEEMMTACQGVGGPSHKARVLAEAMSQVNNANIMMQRGNFKGPKRIIKCFNCGKEGHLARNCRAPRKKGCWKCGQEGHQMKDCSNERQANFLGKLWPSHKGGRPGNFLQNRPEPTAPPVEPTAPPAEPTAPPAESFKFEETTPVPKQELKDREPLISLKSLFGNDPLSQ

SEQ ID NO: 769 - protein, 230 aa, Artificial Sequence
  HIV C gag CEN-1 Conserved, Tailored
IVQNAQGQMVHQALSPRTLNAWVKVVEEKAFSPEIIPMFTALSEGATPSDLNSMLNTVGGHQAAMQMLKDTINDEAAEWDRVHPVHAGPIAPGQMREPRGSDIAGTTSNLQEQIAWMTNNPPIPVGEIYKRWIILGLNKIVRMYSPVSILDIRQGPKEPFRDYVDRFFKCLRAEQATQEVKNWMTDTLLIQNANPDCKTILKALGPGASLEEMMTACQGVGGPSHKARVL

SEQ ID NO: 770 - protein, 515 aa, Artificial Sequence
  HIV C gag CEN-2, Tailored
MGARASILRGEKLDKWERIRLRPGGKKHYMIKHLVWASRELEKFALNPGLLETADGCKQIIKQLHPALQTGTEELKSLYNTVATLYCVHERIEVRDTKEALDRIEEEQNKCQQKTQQAEAADKGKVSQNYPIVQNAQGQMVHQPISPRTLNAWVKVVEEKAFSPEIIPMFTALSEGATPTDLNTMLNTIGGHQAAMQILKDTINEEAVEWDRLHPVQAGPVAPGQIREPRGSDIAGTTSNLQEQIAWMTGNPPVPVGDIYKRWIIMGLNKIVRMYSPVSILDIRQGPKEPFRDYVDRFFKVLRAEQATQEVKNWMTETLLVQNANPDCKIILKGLGPAATLEEMMTACQGVGGPSHKARVLAEAMSQVNNTNIMMQKSNFKGPKRTVKCFNCGKEGHIAKNCRAPRKKGCWKCGREGHQMKDCNERQANFLGKIWPSQKGRPGNFLQNRPEPTAPRPEPTAPPRLEPTAPPAEPSAPPAESFRFEGTTPAPKQESKDREPLISLKSLFGNDPLSQ

SEQ ID NO: 771 - protein, 231 aa, Artificial Sequence
  HIV C gag CEN-2 Conserved, Tailored
PIVQNAQGQMVHQPISPRTLNAWVKVVEEKAFSPEIIPMFTALSEGATPTDLNTMLNTIGGHQAAMQILKDTINEEAVEWDRLHPVQAGPVAPGQIREPRGSDIAGTTSNLQEQIAWMTGNPPVPVGDIYKRWIIMGLNKIVRMYSPVSILDIRQGPKEPFRDYVDRFFKVLRAEQATQEVKNWMTETLLVQNANPDCKIILKGLGPAATLEEMMTACQGVGGPSHKARVL

SEQ ID NO: 772 - protein, 523 aa, Artificial Sequence
  HIV C gag CEN-3, Tailored
MGARASILRGEKLDRWERIRLRPGGKKCYMLKHIVWASRELERFSLNPGLLETAEGCKQIIKQLHPALQTGTEELKSLFNTVATLYCVHKKIDVRDTKEALDKVEEEQNKCQQKTQQAKAADEKVSQNYPIVQNIQGQMVHQALSPRTLNAWVKVVEEKAFSPEIIPMFTALSEEATPQDLNTMLNAVGGHQAAMQMLKETINEEAAEWDRVHPVHAGPIAPGQMREPRGSDIAGTTSNLQEQIAWMTNNPPIPVGEIYKRWIILGLNKIVRMYSPVSILDIRQGPKEPFRDYVDRFFRVLRAEQATQEVKNWMTDTLLIQNANPDCKTILKALGPGASLEEMMTACQGVGGPSHKARVLAEAMSQANNINIMMQRGNFKGPKRTVKCFNCGKEGHIAKNCRAPRKRGCWKCGKEGHQMKDCNERQANFLGRIWPSHKGRPGNFLQNRPEPTAPSAESFRQNRTEPTAPPARLEPTAPPAEPSAPPVESFRFEETTPALKQESKDREPLTSLRSLFGSDPLFQ

SEQ ID NO: 773 - protein, 231 aa, Artificial Sequence
  HIV C gag CEN-3 Conserved, Tailored
PIVQNIQGQMVHQALSPRTLNAWVKVVEEKAFSPEIIPMFTALSEEATPQDLNTMLNAVGGHQAAMQMLKETINEEAAEWDRVHPVHAGPIAPGQMREPRGSDIAGTTSNLQEQIAWMTNNPPIPVGEIYKRWIILGLNKIVRMYSPVSILDIRQGPKEPFRDYVDRFFRVLRAEQATQEVKNWMTDTLLIQNANPDCKTILKALGPGASLEEMMTACQGVGGPSHKARVL

SEQ ID NO: 774 - protein, 513 aa, Artificial Sequence
  HIV C gag CEN-4, Tailored
MGARASVLRGEKLDKWERIRLRPGGKKQYMLKHIVWASRELEKFALNPGLLETAEGCKQIIKQLHPALQTGTEELRSLFNTVATLYCVHKGIDVRDTKEALDKVEEEQNKCQQKTQQAEADKKVSQNYPIVQNIQGQMVHQPLSPRTLNAWVKVVEEKAFSPEVIPMFSALSEGATPGDLNTMLNTIGGHQAAMQMLKDTINDEAAEWDRLHPVHAGPIAPGQMREPRGSDIAGTTSNLQEQIAWMTNNPPVPVGEIYKRWIVLGLNKIVRMYSPVSILDIRQGPKEPFRDYVDRFFRTLRAEQATQEVKNWMTETLLVQNANPDCKNILRALGPGASLEEMMTACQGVGGPSHKARVLAEAMSQANNTNIMMQKSNFKGPRRIVKCFNCGKEGHIAKNCRAPRKRGCWKCGKEGHQMKDCNERQANFLGKIWPSNKGRPGNFLQNRPEPTAPQSRPEPTAPLEPTAPPAEPTAPPAESFKFEETTPAPKQEQKDREPLISLKSLFGNDPLSQ

SEQ ID NO: 775 - protein, 231 aa, Artificial Sequence
  HIV C gag CEN-4 Conserved, Tailored
PIVQNIQGQMVHQPLSPRTLNAWVKVVEEKAFSPEVIPMFSALSEGATPGDLNTMLNTIGGHQAAMQMLKDTINDEAAEWDRLHPVHAGPIAPGQMREPRGSDIAGTTSNLQEQIAWMTNNPPVPVGEIYKRWIVLGLNKIVRMYSPVSILDIRQGPKEPFRDYVDRFFRTLRAEQATQEVKNWMTETLLVQNANPDCKNILRALGPGASLEEMMTACQGVGGPSHKARVL

SEQ ID NO: 776 - protein, 507 aa, Artificial Sequence
  HIV C gag CEN-5, Tailored
MGARASVLRGEKLDKWERIRLRPGGKKRYMLKHIVWASRELEKFALNPGLLETAEGCKQIIKQLQPALQTGTEELKSLFNTVATLYCVHEKIDVRDTKEALDRIEEEQNKCQQKTQQAKAADEKVSQNYPIVQNAQGQMVHQALSPRTLNAWVKVIEEKGFNPEVIPMFTALSDGATPQDLNSMLNTVGGHQAAMQILKDTINEEAAEWDRVHPVHAGPIAPGQMREPRGSDIAGTTSNLQEQIAWMTGNPPIPVGEIYKRWIILGLNKIVRMYSPVSILDIRQGPKEPFRDYVDRFFKALRAEQATQEVKNWMTETLLVQNANPDCKNILRALGPGASLEEMMTACQGVGGPSHKARVLAEAMSQANNTNIMMQRNNFKGPKRIIKCFNCGKEGHIAKNCRAPRKKGCWKCGREGHQMKDCNERQANFLGRIWPSHKGGRPGNFLQNRPEPTAPPVEPTAPPAEPTAPPAESFKFEETTPTPKQEQKDREPLISLKSLFGNDPLSQ

SEQ ID NO: 777 - protein, 231 aa, Artificial Sequence
  HIV C gag CEN-5 Conserved, Tailored
PIVQNAQGQMVHQALSPRTLNAWVKVIEEKGFNPEVIPMFTALSDGATPQDLNSMLNTVGGHQAAMQILKDTINEEAAEWDRVHPVHAGPIAPGQMREPRGSDIAGTTSNLQEQIAWMTGNPPIPVGEIYKRWIILGLNKIVRMYSPVSILDIRQGPKEPFRDYVDRFFKALRAEQATQEVKNWMTETLLVQNANPDCKNILRALGPGASLEEMMTACQGVGGPSHKARVL

SEQ ID NO: 778 - protein, 506 aa, Artificial Sequence
  HIV B gag episensus EG-0, Tailored
MGARASVLSGGELDRWEKIRLRPGGKKKYKLKHIVWASRELERFAVNPGLLETSEGCRQILGQLQPSLQTGSEELKSLYNTVATLYCVHQKIDVKDTKEALDKIEEEQNKSKKKAQQAAADTGNSSQVSQNYPIVQNLQGQMVHQAISPRTLNAWVKVVEEKAFSPEVIPMFSALSEGATPQDLNTMLNTVGGHQAAMQMLKETINEEAAEWDRLHPVHAGPIAPGQMREPRGSDIAGTTSTLQEQIGWMTNNPPIPVGEIYKRWIILGLNKIVRMYSPTSILDIRQGPKEPFRDYVDRFYKTLRAEQASQEVKNWMTETLLVQNANPDCKTILKALGPAATLEEMMTACQGVGGPGHKARVLAEAMSQVTNSATIMMQRGNFRNQRKTVKCFNCGKEGHIARNCRAPRKKGCWKCGKEGHQMKDCTERQANFLGKIWPSHKGRPGNFLQSRPEPTAPPEPTAPPEESFRFGEETTTPSQKQEPIDKELYPLASLKSLFGNDPSSQ

SEQ ID NO: 779 - protein, 231 aa, Artificial Sequence; identical to SEQ ID NO: 731
  HIV B gag episensus EG-0 Conserved, Tailored

SEQ ID NO: 780 - protein, 509 aa, Artificial Sequence
  HIV B gag CEN-1, Tailored
MGSRASVLSGGKLDQWEKIRLRPGGKKRYKLKHLVWASRELERFAVNPSLLETSEGCKQILGQLQPALQTGSEELRSLYNTIAVLYCVHQRIEVKDTKEALEKIEEEQNKCKKKAQQAAAAAADTGNSNQVSQNYPIVQNMQGQMVHQALSPRTLNAWVKVIEEKAFSPEVIPMFTALSEGATPADLNTMLNTIGGHQAAMQILKETINEEAAEWDRVHPVHAGPVAPGQMREPRGSDIAGSTSTLQEQIAWMTSNPPIPVGDIYKRWIIMGLNKIVRMYSPTSILDIKQGPKEPFRDYVDRFYKTLRAEQATQEVKNWMTETLLVQNSNPDCKTILKALGPGATLEEMMTACQGVGGPSHKARVLAEAMSQVTTPPAIMMQRGNFKNQRKIVKCFNCGKEGHLARNCRAPRKRGCWKCGREGHQMKDCSERQANFLGKIWPSYKGRPGNFLQNRPEPTAPPAEPTAPPAESFRFGEETATPPQKQEPIDKEMYPLTSLRSLFGNDPSQ

SEQ ID NO: 781 - protein, 231 aa, Artificial Sequence
  HIV B gag CEN-1 Conserved, Tailored
PIVQNMQGQMVHQALSPRTLNAWVKVIEEKAFSPEVIPMFTALSEGATPADLNTMLNTIGGHQAAMQILKETINEEAAEWDRVHPVHAGPVAPGQMREPRGSDIAGSTSTLQEQIAWMTSNPPIPVGDIYKRWIIMGLNKIVRMYSPTSILDIKQGPKEPFRDYVDRFYKTLRAEQATQEVKNWMTETLLVQNSNPDCKTILKALGPGATLEEMMTACQGVGGPSHKARVL

SEQ ID NO: 782 - protein, 513 aa, Artificial Sequence
  HIV B gag CEN-2, Tailored
MGSRASVLSGGKLDKWEKIRLRPGGKKKYRLKHLVWASRELERYALNPGLLETAEGCRQILGQLQPALQTGSEELKSLFNTVAVLYCVHQRIDVKDTKEALEKIEEEQNKSKKKTQQAAADTGNNSQVKVSQNYPIVQNIQGQMVHQALSPRTLNAWVKVIEEKAFSPEVIPMFTALSEGATPHDLNTMLNTIGGHQAAMQILKETINDEAAEWDRTHPVHAGPVAPGQMRDPRGSDIAGTTSNLQEQIGWMTHNPPIPVGDIYKRWIIMGLNKIVRMYSPVSILDIKQGPKEPFRDYVDRFYKILRAEQASQDVKNWMTETLLVQNSNPDCKTILKALGPGATLEEMMTACQGVGGPSHKARVLAEAMSQMTNSATIMMQKGNFRNQRKTIKCFNCGKEGHLARNCRAPRKRGCWKCGQEGHQMKDCNERQANFLGKIWPSSKGRPGNFLQSRPESRPEPTAPPAEPTAPPAESFRFGEETATPPQKQEPIDKEMYPLASLRSLFGNDPSSK

SEQ ID NO: 783 - protein, 231 aa, Artificial Sequence
  HIV B gag CEN-2 Conserved, Tailored
PIVQNIQGQMVHQALSPRTLNAWVKVIEEKAFSPEVIPMFTALSEGATPHDLNTMLNTIGGHQAAMQILKETINDEAAEWDRTHPVHAGPVAPGQMRDPRGSDIAGTTSNLQEQIGWMTHNPPIPVGDIYKRWIIMGLNKIVRMYSPVSILDIKQGPKEPFRDYVDRFYKILRAEQASQDVKNWMTETLLVQNSNPDCKTILKALGPGATLEEMMTACQGVGGPSHKARVL

SEQ ID NO: 784 - protein, 510 aa, Artificial Sequence
  HIV B gag CEN-3, Tailored
MGARASILSGGELDKWEKIRLRPGGKKQYKLKHIVWASRELERFALNPGLLETSGGCRQILEQLQPALQTGSEELRSLYNTVAVLYCVHQRIEVKDTKEALEKIEEEQNKCKKKAQQAAAAAADTGNNSQVSQNYPIVQNIQGQMVHQALSPRTLNAWVKVIEEKAFSPEVIPMFTALSEGATPGDLNLMLNAVGGHQAAMQMLKDTINEEAADWDRLHPVQAGPVAPGQLREPRGSDIAGTTSNLQEQIAWMTHNPPIPVGEIYKRWIIMGLNKIVRMYSPVSILDIKQGPKEPFRDYVDRFYRTLRAEQASQDVKNWMTETLLIQNANPDCRTILKALGPGATLEEMMTACQGVGGPSHKARVLAEAMSQATSSATIMMQKGNFRNQRKIVKCFNCGKEGHIAKNCRAPRKRGCWKCGREGHQMKDCSERQANFLGKIWPSYKGRPGNFLQNRPEPTAPPAEPTAPPAESFRFGEETTTPPQKQEPTDKELYPLASLRSLFGNDPLSQ

SEQ ID NO: 785 - protein, 231 aa, Artificial Sequence
  HIV B gag CEN-3 Conserved, Tailored
PIVQNIQGQMVHQALSPRTLNAWVKVIEEKAFSPEVIPMFTALSEGATPGDLNLMLNAVGGHQAAMQMLKDTINEEAADWDRLHPVQAGPVAPGQLREPRGSDIAGTTSNLQEQIAWMTHNPPIPVGEIYKRWIIMGLNKIVRMYSPVSILDIKQGPKEPFRDYVDRFYRTLRAEQASQDVKNWMTETLLIQNANPDCRTILKALGPGATLEEMMTACQGVGGPSHKARVL

SEQ ID NO: 786 - protein, 506 aa, Artificial Sequence
  HIV B gag CEN-4, Tailored
MGARASILSGGELDKWEKIRLRPGGKKKYRLKHIVWASNELERFALNPGLLETSDGCRQILGQLHPSLQTGSEELRSLYNTVAVLYCVHQRIEIKDTKEALEKIEEEQNKCKKKAQQAAAAQQAAAGTGNNSQVSQNYPIVQNMQGQMVHQALSPRTLNAWVKVIEEKAFSPEVIPMFTALSEGATPHDLNTMLNTIGGHQAAMQILKETINEEAAEWDRVHPVHAGPIAPGQIREPRGSDIAGTTSNLQEQIGWMTHNPPIPVGEIYKKWIIMGLNKIVRMYSPVSILDIKQGPKEPFRDYVDRFYKTLRAEQATQEVKNWMTETLLVQNSNPDCKTILKALGPGATLEEMMTACQGVGGPAHKARVLAEAMSQATNSAAIMMQKGNFRNQRRTVKCFNCGKEGHIAKNCRAPRKKGCWKCGQEGHQMKDCNERQANFLGRSWPSLKGRPGNFLQNRPEPSAPPEESFKFGEETTTPPQKQEPIDKDLYPLASLRSLFGNDPSST

SEQ ID NO: 787 - protein, 231 aa, Artificial Sequence
  HIV B gag CEN-4 Conserved, Tailored
PIVQNMQGQMVHQALSPRTLNAWVKVIEEKAFSPEVIPMFTALSEGATPHDLNTMLNTIGGHQAAMQILKETINEEAAEWDRVHPVHAGPIAPGQIREPRGSDIAGTTSNLQEQIGWMTHNPPIPVGEIYKKWIIMGLNKIVRMYSPVSILDIKQGPKEPFRDYVDRFYKTLRAEQATQEVKNWMTETLLVQNSNPDCKTILKALGPGATLEEMMTACQGVGGPAHKARVL

SEQ ID NO: 788 - protein, 505 aa, Artificial Sequence
  HIV B gag CEN-5, Tailored
MGSRASVLSGGKLDKWEKIRLRPGGKKKYQLKHIVWASRELERYALNPGLLETAEGCRQILEQLQPALQTGSEELRSLYNTVAVLYCVHQKIEVKDTKEALEKVEEEQNKSKKRIQQAQQAAAADTGNSSKVSQNYPIVRNLQGQMVHQPISPRTLNAWVKVIEEKAFSPEVIPMFSALAEGATPQDLNLMLNAVGGHQAAMQMLKDTINEEAAEWDRMHPVHAGPVAPGQMREPRGSDIAGTTSNLQEQIGWMTSNPPIPVGEIYKRWIIMGLNKIVRMYSPVSILDIKQGPKEPFRDYVDRFYRTLRAEQASQDVKNWMTETLLVQNSNPDCKTILKALGPGATLEEMMTACQGVGGPSHKARVLAEAMSQVTNSTAIMMQRGNFKNQRKIVKCFNCGKEGHIAKNCRAPRKRGCWKCGREGHQMKECTERQVNFLGKIWPSYKGRPGNFLQNRPEPTAPPAPPEESFRFGEGTTTPSQKQGTIDKELYPLTSLRSLFGNDPS

SEQ ID NO: 789 - protein, 231 aa, Artificial Sequence
  HIV B gag CEN-5 Conserved, Tailored
PIVRNLQGQMVHQPISPRTLNAWVKVIEEKAFSPEVIPMFSALAEGATPQDLNLMLNAVGGHQAAMQMLKDTINEEAAEWDRMHPVHAGPVAPGQMREPRGSDIAGTTSNLQEQIGWMTSNPPIPVGEIYKRWIIMGLNKIVRMYSPVSILDIKQGPKEPFRDYVDRFYRTLRAEQASQDVKNWMTETLLVQNSNPDCKTILKALGPGATLEEMMTACQGVGGPSHKARVL

SEQ ID NO: 790 - protein, 9 aa, Artificial Sequence
  Toy Sequence
VTSSNMNNA

SEQ ID NO: 791 - protein, 9 aa, Artificial Sequence
  Toy Sequence
TSSNMNNAD

SEQ ID NO: 792 - protein, 19 aa, Artificial Sequence
  Toy Sequence
TSSNMNNADSVWLRAQEEE

SEQ ID NO: 793 - protein, 19 aa, Artificial Sequence
  Toy Sequence
TSSNMNNADCVWLRAQEEE

SEQ ID NO: 794 - protein, 7 aa, Artificial Sequence
  Toy Sequence
ARCHSLM

SEQ ID NO: 795 - protein, 7 aa, Artificial Sequence
  Toy Sequence
DEFGKLM

SEQ ID NO: 796 - protein, 12 aa, Artificial Sequence
  Toy Sequence
EPTAPPAEPTAP

SEQ ID NO: 797 - protein, 12 aa, Artificial Sequence
  Toy Sequence
PTAPPAEPTAPP

SEQ ID NO: 798 - protein, 13 aa, Artificial Sequence
  Toy Sequence
EPTAPPAEPTAPP

SEQ ID NO: 799 - protein, 7 aa, Artificial Sequence
  Toy Sequence
ARCGSLM

SEQ ID NO: 800 - protein, 7 aa, Artificial Sequence
  Toy Sequence
ARCGSPM

SEQ ID NO: 801 - protein, 7 aa, Artificial Sequence
  Toy Sequence
ARYGSLM

SEQ ID NO: 802 - protein, 7 aa, Artificial Sequence
  Toy Sequence
AYCHSLM

SEQ ID NO: 803 - protein, 7 aa, Artificial Sequence
  Toy Sequence
YRCHSLM

SEQ ID NO: 804 - protein, 7 aa, Artificial Sequence
  Toy Sequence
DEFGSLM

SEQ ID NO: 805 - protein, 7 aa, Artificial Sequence
  Toy Sequence
DEFGKLM

SEQ ID NO: 806 - protein, 8 aa, Artificial Sequence
  Toy Sequence
ARCCDEGH

SEQ ID NO: 807 - protein, 8 aa, Artificial Sequence
  Toy Sequence
ARCDEFGH

SEQ ID NO: 808 - protein, 8 aa, Artificial Sequence
  Toy Sequence
ARCCDEGH

SEQ ID NO: 809 - protein, 8 aa, Artificial Sequence
  Toy Sequence
ARCDEFGH
